(19) United States
(12) Patent Application Publication
(10) Pub. No.: US 2023/0248815 A1
(43) Pub. Date: Aug. 10, 2023

(54) CHIMERIC RSV AND CORONAVIRUS PROTEINS, IMMUNOGENIC COMPOSITIONS, AND METHODS OF USE

(71) Applicant: Meissa Vaccines, Inc., Redwood City, CA (US)

(72) Inventors: Martin Moore, San Carlos, CA (US); Robert Jordan, Foster City, CA (US); Mariana Tioni, Pacifica, CA (US)

(21) Appl. No.: 18/010,436

(22) PCT Filed: Jun. 17, 2021
(86) PCT No.: PCT/US2021/037846

§ 371 Date: Dec. 14, 2022

Related U.S. Application Data
(60) Provisional application No. 63/194,092, filed on May 27, 2021.
(60) Provisional application No. 63/160,445, filed on Mar. 12, 2021.
(60) Provisional application No. 63/040,193, filed on Jun. 17, 2020.

(51) Int. Cl. A61K 39/12; C07K 14/135; C07K 14/165; C12N 15/62; C12N 15/86; A61P 31/14

(52) U.S. Cl. CPC A61K 39/12; C07K 14/135; C07K 14/165; C12N 15/62; C12N 15/86; A61P 31/14; A61K 2039/5254

(57) ABSTRACT

The invention relates generally to chimeric viral fusion proteins comprising the ectodomain and optionally the transmembrane domain of a first viral fusion protein (e.g., a spike protein of a coronavirus) and the cytoplasmic domain of a second viral fusion protein (e.g. RSV), immunogenic compositions comprising such chimeric proteins, and methods of use of same.

### CROSS REFERENCE TO RELATED APPLICATIONS

[0001] This application claims the benefit of and priority to U.S. Provisional Patent Application No. 63/040,193, filed Jun. 17, 2020; U.S. Provisional Patent Application No. 63/160,445, filed Mar. 12, 2021; and U.S. Provisional Patent Application No. 63/194,092, filed May 27, 2021, the disclosure of each of which is hereby incorporated by reference in its entirety.

### SEQUENCE LISTING

[0002] The instant application contains a Sequence Listing which has been submitted electronically in ASCII format and is hereby incorporated by reference in its entirety. Said ASCII copy, created on Jun. 16, 2021, is named MSA-007WO_SL.txt and is 1,822,459 bytes in size.

### FIELD OF THE INVENTION

[0003] The invention relates generally to chimeric RSV and non-RSV proteins (e.g., non-pneumoviridae such as coronavirus), immunogenic compositions comprising such chimeric proteins, and methods of use of same.

### BACKGROUND

[0004] The Coronaviridae are a family of large, enveloped, single stranded RNA viruses responsible for respiratory and gastrointestinal disease in birds, fish, and mammals. The family derives its name from the hallmark appearance under electron microscopy of the crown-resembling spike proteins on virion surfaces, reported in the 1960s when the first coronavirus (CoV) strains were discovered (Kahn et al. (2005) The Pediatric Infectious Disease Journal, 24(11), S223-S227). Core features shared among CoVs include a virion diameter ranging 100-160 nm, the aforementioned spike (S) protein that binds to host cells, the membrane (M) glycoprotein, the envelope (E) protein, the nucleocapsid (N) protein, and a positive sense single stranded RNA genome ranging from 27-32 kb in length (Cui et al. (2019) Nature Reviews Microbiology, 17(3), 181-192). Based upon genetic phylogeny, all known human coronaviruses (HCoVs) are in the subfamily Orthocoronavirinae, specifically in the Alpha- and Betacoronavirus genera.

[0005] Certain HCoVs are globally endemic and cause seasonal upper or lower respiratory tract infections that are subclinical to moderate in severity in the immunocompetent host. These four strains (HCoV-229E, -NL63, -OC43, and -HKU1) collectively cause 10 to 30% of adult upper respiratory tract infections (Paules et al. (2020) JAMA, 323(8), 707-708) and have been detected in 8.2-10.8% of children with acute respiratory illnesses (Varghese et al. (2018) Journal of the Pediatric Infectious Diseases Society, 7(2), 151-158). In 2002 and 2012 two highly pathogenic beta-coronaviruses emerged from animal reservoirs to infect humans, triggering multinational epidemics of severe, life threatening respiratory disease. The pandemic caused by Severe Acute Respiratory Syndrome (SARS)-CoV resulted in over 8000 infected individuals in 29 countries who faced a 11% cumulative case fatality rate (CFR) (The World Health Organization (WHO) 2020), before it was contained eight months later. In contrast, Middle East Respiratory Syndrome (MERS)-CoV remains endemic in the Arabian Peninsula, where it has caused nearly 2500 cases and, with a 34% CFR, over 850 deaths in 27 countries (WHO 2019). No licensed therapeutic or preventive vaccine is available for SARS-CoV or MERS-CoV.

[0006] The COVID-19 global pandemic that began in Wuhan, China in December 2019 is caused by the highly transmissible Severe Acute Respiratory Syndrome Coronavirus 2 (SARS-CoV-2, Coronaviridae Study Group of the International Committee on Taxonomy of Viruses (2020) Nat Microbiol. 5(4):536-544). COVID-19 has an overall mortality rate of approximately 2% in the elderly and patients with serious underlying medical conditions such as heart or lung disease and diabetes. As of May 18, 2021, there were 163,312,429 confirmed cases of SARS-CoV-2 infection with a total of 3,386,825 deaths worldwide (WHO dashboard, at website covid19.who.int/).

[0007] SARS-CoV-2 is an enveloped RNA virus that relies on its surface glycoprotein, spike, for entry into host cells (Letko et al. (2020) Nat Microbiol. 5(4):562-569, Shang et al. (2020) Proc Natl Acad Sci USA. 117(21):11727-11734). The spike protein is a type I fusion protein and forms a trimer that protrudes on the viral membrane giving the virus its characteristic appearance of a crown under electron microscopy (Turofiovn el al. (2020) Science 370(6513):203-208; Li (2005) Annu Rev Virol. 3(1):237-261). The angiotensin converting enzyme 2 (ACE2) has been identified as a cellular receptor for SARS-CoV-2 spike (Letko et al., supra; Hoffmann et al. (2020) Cell 181(2):271-280). Disrupting the interaction of ACE2 and the receptor binding domain (RBD) of spike is at the core of vaccine design and therapeutics. Currently, three COVID-19 vaccines have been approved for emergency use in the U.S. (CDC, “Authorized and Recommended Vaccines” at website cdc.gov/coronavirus/2019-ncov/vaccines/different-vaccines.html). The three vaccines are based on SARS-CoV-2 spike protein and their high level of efficacy has validated spike as a protective antigen. However, despite existing vaccines, as of May 20, 2021, only 1.56 billion vaccine doses have been administered, equal to 20 doses for every 100 people. Some countries have not reported the administration of any vaccine doses.

[0008] All the EUA vaccines currently in use are delivered intramuscularly and none of them is live attenuated. Live attenuated vaccines (LAV) often use the same route of entry as the pathogen they target and replicate in the host mimicking natural infection without causing disease. As a result, LAV generate mucosal immunity at the site of infection, blocking the pathogen at the earliest phases of infection thus helping control systemic spread (Holngren et al. (2005) Nat. Med 11(4 Suppl):S45-53). In the case of influenza infection, it has been shown that LAV induce better mucosal IgA and cell-mediated immunity relative to other vaccine types, eliciting a longer lasting broader immune response that more closely resembles natural immunity (Cox et al. (2004) Scand J Immunol. 59(1):1-15). Furthermore, comparison of intramuscularly and intranasally administered vaccines against SARS-CoV in mice showed that serum IgA was only induced following intranasal vaccination (See et al. (2006) J Gen Virol. 87(Pt 3):641-650) and only intranasal vaccination provided protection in both upper and lower respiratory tract (Hassan et al. (2020) Cell 183(1):169-184.e13). For SARS-CoV-2 in particular, it has been reported that the early antibody response is dominated by IgA and that mucosal IgA are highly neutralizing (Sterlin et al. (2021) Sci Transl Med. 13(577):eabd2223), underscoring the importance of developing an intranasal vaccine capable of eliciting mucosal immunity. According to the WHO vaccine tracker, there are currently 101 vaccines in clinical trials, only 3 of which are intranasal live attenuated vaccines (“The Landscape of candidate vaccines in clinical development”, at website who.int/publications/m/item/draft-landscape-of-covid-19-candidate-vaccines as of May 14, 2021, prepared by WHO). These candidate live attenuated vaccines, however, may be susceptible to the high rate of RNA recombination observed in Coronaviruses that can result in loss of attenuation during co-infection with wild-type Coronaviruses.

[0009] Accordingly, there is a need in the art for immunogenic compositions, including vaccines, to prevent or lessen the severity of COVID-19 disease. The development of a needle-free, intranasal vaccine that is not prone to recombination and that generates both mucosal and humoral immune responses and that can be produced with high yields is needed.

### SUMMARY OF THE INVENTION

[0010] The disclosure is based, in part, on the discovery of a chimeric protein comprising portions of two viral fusion proteins which can be used in an immunogenic composition (e.g., a vaccine) for the prevention of a viral infection. The chimeric proteins described herein can be used in a vaccine construct that includes components of an RSV virus (e.g. proteins encoded by codon-deoptimized RSV genes) but that expresses the fusion protein on the surface of the virus. The chimeric protein, having a portion of a first fusion protein (e.g., an ectodomain of a fusion protein) and a portion of a second fusion protein (e.g., a cytoplasmic tail of a second fusion protein), promotes proper assembly of the chimeric protein into RSV particles.

[0011] In certain embodiments, the disclosure relates to a chimeric protein comprising a fusion protein from a non-RSV virus (any virus that is not RSV), such as a coronavirus spike protein or “S protein”; e.g., a SARS-CoV-2 spike protein, and an RSV F protein which can be used in an immunogenic composition (e.g., a vaccine) for the prevention of a coronavirus infection (e.g., a SARS-CoV-2 infection). The chimeric proteins described herein can be used in a vaccine construct that includes components of an RSV virus (e.g. codon-deoptimized RSV proteins) but that expresses the non-RSV fusion protein (e.g., the chimeric coronavirus S protein/RSV F protein) on the surface of the virus. The chimeric protein, having a portion of a non-RSV fusion protein (e.g., an ectodomain and optionally a transmembrane portion) and a portion of an RSV F protein (e.g., a cytoplasmic tail portion), promotes proper assembly of the chimeric protein into RSV particles.

[0012] In other embodiments, the cytoplasmic tail portion is a non-RSV fusion protein, such as the HA protein of Orthomyxoviridae (e.g., influenza virus); the Env protein of Retroviridae; the F and/or HN proteins of Paramyxoviridae (e.g., parainfluenza, measles, and mumps viruses); the S protein of Coronaviridae; the GP protein of Filoviridae; the GP and/or SSP proteins of Arenaviridae; the E1/E2 protein of Togaviridae; the E (e.g., in TBEV) or E1/E2 (e.g., in HCV) protein of Flaviviridae; the GN/GC protein of Bunyaviridiae; the G protein of Rhabdoviridae (VSV and rabies); the gB, gD, and/or gH/L protein of Herpesviridae; one or more of a complex of 8 proteins in poxviridae; and the S and/or L protein of Hepadnaviridae

[0013] In certain embodiments, the disclosure relates to an immunogenic composition comprising a chimeric protein as described herein, together with one or more RSV proteins (e.g., an NS1 and NS2 protein, wherein the NS1 and/or NS2 protein is optionally encoded by a codon-deoptimized gene). Although the immunogenic compositions described herein can, in certain embodiments, include a G gene, in other embodiments, the immunogenic composition (e.g., vaccine) does not include an RSV G gene. Without wishing to be bound by theory, it is believed that the RSV G gene is not needed, because certain fusion proteins, such as the coronavirus S protein, mediates both receptor attachment and virus-cell fusion. Indeed, the coronavirus spike protein is fully functional, necessary and sufficient for viral entry. A recombinant RSV-spike virus lacking G and F proteins can enter host cells, as described in Example 2 herein, indicating that the recombinant virus relies entirely on the chimeric coronavirus spike/RSV F protein for entry. Further, by removing RSV G and F, the resulting immunogenic composition should not be inhibited by pre-existing RSV immunity because known RSV neutralizing antibodies are primarily against F or against G.

[0014] In certain embodiments, the disclosure relates to a vaccine comprising a chimeric fusion protein as described herein that is administered intranasally, a needle-free route that is advantageous for global immunization. The intranasal route is similar to the natural route of infection of SARS-CoV-2 and generates both mucosal and humoral immune responses in AGMs without any adjuvant formulation, Modeling based on yields from the production of vaccines disclosed herein projected a potential dose output of hundreds of millions of doses per annum in a modestly sized facility using high intensity bioreactor systems. Mucosally delivered live attenuated vaccines such as those described herein entail minimal downstream processing and may be less expensive to produce than existing vaccines. In addition, needle-free delivery reduces supply risks. The vaccines described herein are suitable as a primary vaccine or as a heterologous booster.

[0015] Accordingly, in one aspect, the disclosure relates to a chimeric protein comprising an ectodomain of a SARS-CoV-2 spike protein and a cytoplasmic tail portion of an RSV fusion (F) protein. In certain embodiments, the chimeric protein comprises, in an N- to C-terminal direction, the ectodomain of the SARS-CoV-2 spike protein, and the cytoplasmic tail portion of the RSV fusion (F) protein. In certain embodiments, the chimeric protein further comprises a transmembrane domain of a SARS-CoV-2 spike protein. In certain embodiments, the chimeric protein further comprises a transmembrane domain of an RSV fusion protein.

[0016] In certain embodiments, the chimeric protein comprises a sequence selected from the group consisting of SEQ ID NOs: 1-6, 62, 68, 74, 80, 86, 92, 98, and 110 or a variant thereof having at least about 85% (e.g., at least about 90%, at least about 95%, at least about 96%, at least about 97%, at least about 98%, or at least about 99%) sequence identity to a sequence selected from the group consisting of SEQ ID NOs: 1-6, 62, 68, 74, 80, 86, 92, 98, and 110.

[0017] In another aspect, the disclosure relates to an immunogenic composition comprising live (e.g., live attenuated) chimeric virus comprising a nucleic acid encoding a chimeric protein comprising an ectodomain of a SARS-CoV-2 spike protein and a cytoplasmic tail portion of an RSV fusion (F) protein. In certain embodiments, the nucleic acid encodes a chimeric protein comprising, in an N- to C-terminal direction, the ectodomain of the SARS-CoV-2 spike protein and the cytoplasmic tail portion of the RSV fusion (F) protein. In certain embodiments, the nucleic acid comprises a chimeric protein further comprising a transmembrane domain of a SARS-CoV-2 spike protein. In certain embodiments, the nucleic acid comprises a chimeric protein further comprising a transmembrane domain of an RSV fusion protein.

[0018] In certain embodiments, the nucleic acid encodes a chimeric protein comprising a sequence selected from the group consisting of SEQ ID NOs: 1-6, 62, 68, 74, 80, 86, 92, 98, and 110 or a variant thereof having at least about 85% (e.g., at least about 90%, at least about 95%, at least about 96%, at least about 97%, at least about 98%, or at least about 99%) sequence identity to a sequence selected from the group consisting of SEQ ID NOs: 1-6, 62, 68, 74, 80, 86, 92, 98, and 110. In certain embodiments, the nucleic acid comprises a sequence selected from the group consisting of SEQ ID NOs: 7-12, 63, 69, 75, 81, 87, 93, 99, and 111, or a fragment or variant thereof having at least about 85% (e.g., at least about 90%, at least about 95%, at least about 96%, at least about 97%, at least about 98%, or at least about 99%) sequence identity to a sequence selected from the group consisting of SEQ ID NOs: 7-12, 63, 69, 75, 81, 87, 93, 99, and 111, or an RNA counterpart of any of the foregoing, or a complementary sequence of any of the foregoing.

[0019] It is understood that for viral nucleic acid sequences expressed as DNA sequences (i.e., using “T” nucleotides), the corresponding RNA sequence, in which “U” nucleotides are substituted for “T” nucleotides, is also contemplated. In addition, it is understood that where antigenomic sequences (e.g., as found in an expression vector) are provided, the complementary sequence, as would be found in an immunogenic composition (e.g., the genome of a virus and/or a vaccine sequence), is also contemplated.

[0020] In certain embodiments, the live chimeric virus further comprises an NS1 and/or an NS2 protein of RSV. In certain embodiments, the live chimeric virus does not comprise a gene that encodes RSV G protein.

[0021] In certain embodiments, the immunogenic composition further comprises an adjuvant and/or other pharmaceutically acceptable carrier. In certain embodiments, the adjuvant is an aluminum gel, aluminum salt, or monophosphoryl lipid A. In certain embodiments, the adjuvant is an oil-in-water emulsion optionally comprising α-tocopherol, squalene, and/or a surfactant.

[0022] In another aspect, the disclosure relates to a method for immunizing a subject against a SARS-CoV-2 virus, the method comprising administering to the subject an effective amount of an immunogenic composition as described herein. In certain embodiments, the administration is intranasal administration. In certain embodiments, the immunogenic composition is administered a dose of between about 10³ and about 10⁶. In certain embodiments, administration of the immunogenic composition induces a SARS-CoV-2 spike-specific mucosal IgA response or generates serum neutralizing antibodies.

[0023] In another aspect, the disclosure relates to a nucleic acid encoding a chimeric protein as described herein. In certain embodiments, the nucleic acid comprises a sequence selected from the group consisting of SEQ ID NOs: 7-12, 63, 69, 75, 81, 87, 93, 99, and 111 or a fragment of variant thereof having at least about 85% (e.g., at least about 90%, at least about 95%, at least about 96%, at least about 97%, at least about 98%, or at least about 99%) sequence identity to a sequence selected from the group consisting of SEQ ID NOs: 7-12, 63, 69, 75, 81, 87, 93, 99, and 111, or an RNA counterpart of any of the foregoing, or a complementary sequence of any of the foregoing.

[0024] In another aspect, the disclosure relates to a vector comprising a nucleic acid as described herein. In certain embodiments, the vector is selected from a plasmid or a bacterial artificial chromosome. In certain embodiments, the vector is a BAC comprising a sequence selected from the group consisting of SEQ ID NOs: 54-59, 66, 67, 72, 73, 78, 79, 84, 85, 90, 91, 96, 97, 102, 103, 114, 115, and 131-136 or a variant thereof having at least about 85% (e.g., at least about 90%, at least about 95%, at least about 96%, at least about 97%, at least about 98%, or at least about 99%) sequence identity to a sequence selected from the group consisting of SEQ ID NOs: 54-59, 66, 67, 72, 73, 78, 79, 84, 85, 90, 91, 96, 97, 102, 103, 114, 115, and 131-136.

[0025] In another aspect, the disclosure relates to an isolated recombinant particle comprising an NS1 and/or an NS2 protein of RSV and a chimeric SARS-CoV-2 spike protein-RSV fusion (F) protein as described herein. In certain embodiments, the isolated recombinant particle comprises a live attenuated chimeric RSV-SARS-CoV-2 genome or antigenome.

[0026] In another aspect, the disclosure relates to a live attenuated chimeric RSV-SARS-CoV-2 antigenome comprising a sequence selected from the group consisting of SEQ ID NOs: 13-18, 65, 71, 77, 83, 89, 95, 101, 104-109, and 113 or a variant thereof having at least about 85% (e.g., at least about 90%, at least about 95%, at least about 96%, at least about 97%, at least about 98%, or at least about 99%) sequence identity to a sequence selected from the group consisting of SEQ ID NOs: 13-18, 65, 71, 77, 83, 89, 95, 101, 104-109, and 113, or an RNA counterpart of any of the foregoing, or a complementary sequence of any of the foregoing.

[0027] These and other aspects and features of the invention are described in the following detailed description and claims.

### BRIEF DESCRIPTION OF THE DRAWINGS

[0028] In order to understand the invention and to demonstrate how it may be carried out in practice, embodiments are now described, by way of non-limiting example only, with reference to the accompanying drawings in which:

[0029] FIG. 1 is a schematic showing the design of MV-014-212. In MV-014-212, the NS1 and NS2 genes are deoptimized and the RSV SH, G and F genes are deleted and replaced by a gene encoding a chimeric protein spike-F. The amino acid sequence at the junction is shown below the block graphic. The transmembrane domain of spike is represented in light grey, to the left, and the cytoplasmic tail of F is depicted in dark grey, to the right. The reporter virus MVK-014-212, encoding the fluorescent protein mKate2 in the first gene position, is schematically shown at the bottom or the panel. NTD: N-terminal domain. RBD: Receptor binding domain. S1: subunit S1. S2: Subunit S2. S1/S2 and S2′: protease cleavage sites. FP: fusion peptide. IFP: Internal fusion peptide. HR1 and 2: heptad repeats 1 and 2. TM: transmembrane domain. CT: cytoplasmic tail. FIG. 1 discloses SEQ ID NO: 139.

[0030] FIG. 2 is a schematic depicting the sequences of the C-termini of the candidates, showing the different positions of the junction between the RSV F protein cytoplasmic tail and the SARS-CoV-2 spike protein transmembrane domain. The candidates were designed to contain an mKate2 gene as a fluorescent marker to follow rescue and propagation in culture. The 7 candidates listed in this figure (and in TABLE 3) were evaluated by their ability to rescue (defined as the generation of red fluorescent foci) and to grow to titers of 10⁵ PFU/mL or higher. MV-014-212 was chosen to pursue further investigation. The sequence of SARS-CoV-2 spike shows amino acids 1198-1273 of SEQ ID NO: 23. The sequence of MV 014-210 shows amino acids 1198-1278 of SEQ ID NO: 1. The sequence of MV 014-211 shows amino acids 1198-1278 of SEQ ID NO: 2. The sequence of MV 014-212 shows amino acids 1198-1290 of SEQ ID NO: 3. The sequence of MV 014-213 shows amino acids 1198-1284 of SEQ ID NO: 98. The sequence of MV 014-220 shows amino acids 1198-1275 of SEQ ID NO: 4. The sequence of MV 014-230 shows amino acids 1198-1268 of SEQ ID NO: 5. The sequence of MV 014-240 shows amino acids 1198-1271 of SEQ ID NO: 6. The sequence of MV 014-215 shows amino acids 1198-1260 of SEQ ID NO: 110. The sequence of RSV F (the C-terminal portion of the RSV F protein) is shown and provided at SEQ ID NO: 130.

[0031] FIG. 3 is a schematic showing the design of the BAC_DB1_mKate vector used to create a chimeric RSV/coronavirus vaccine.

[0032] FIGS. 4A-4C provides brightfield and fluorescence images of cell monolayers showing the propagation of MV-014-210 mediated by the fusion spike-F protein.

[0033] FIG. 5 is a schematic showing the rescue of recombinant MV-014-212 virus and viruses derived from it.

[0034] FIG. 6 provides micrographs showing syncytia formed by MV-014-212 and derived recombinant viruses. Micrographs were taken at a total amplification of 100× under phase contrast or using TRITC filter.

[0035] FIG. 7 shows a schematic of a coronavirus spike protein, its glycosylation sites (short black bars), and its furin cleavage site.

[0036] FIG. 8A is a Western blot showing full-length purified SARS-CoV-2 spike protein lacking the furin cleavage site (lane 1), MVK-014-212 (lane 2), MV-014-212 (lane 3), mock-infected Vero cell lysate (lane 4), blank, (water, lane 5). The molecular weight marks correspond to the migration of the BIO-RAD Precision Plus Protein Dual Color Standards (Cat #1610374). FIG. 8B is a graph showing multicycle replication kinetics of MV-014-212 compared with RSV A2 in serum-free Vero cells. Cells were infected at an MOI of 0.01 and incubated at 32° C. Cells and supernatants were collected at 0, 12, 24, 48, 72, 96, and 120 hours post-infection. Titers of the samples were determined by plaque assay in Vero cells. Data points represent the means of two replicate wells and error bars represent the standard deviation. FIG. 8C is a graph showing multicycle replication kinetics of MV-014-212 compared with MVK-014-212 in serum-free Vero cells. Cells were infected at an MOI of 0.01 and incubated at 32° C. Cells and supernatants were collected at 0, 3, 24, and 72 hours post-infection. Titers of the samples were determined by plaque assay in Vero cells. Data points represent the means of three replicate wells and error bars represent the standard deviation. FIG. 8D is a graph showing the results of a short-term thermal stability assay. Virus stocks of MV-014-212 prepared in Williams E+SPG or prepared in SPG alone were incubated for 6 h at −80° C., 4° C., −20° C. and room temperature and the titer after incubation was determined by plaque assay.

[0037] FIG. 9 shows a schematic of the genetic stability experiment described in Example 3. Briefly, the genetic stability of MV-014-212 was examined by serial passaging in vitro. Three flasks of subconfluent Vero cells were infected with an aliquot of MV-014-212 and passaged the 3 lineages in parallel for 10 passages. Using RT-PCR followed by Sanger sequencing, the sequence of the entire genome of the starting stock (passage 0) and passage 10 for all lineages was determined. The accumulation of variants was not detected, suggesting that the MV-014-212 vaccine candidate is stable.

[0038] FIG. 10 is a schematic overview of a SARS-CoV-2 challenge test performed on African Green Monkeys (AGM) inoculated with MV-014-212, wt RSV, or PBS. Nasal swabs (NS) were obtained on Days 1 through 12. Bronchoalveolar lavage (BAL) were collected on Days 2, 4, 6, 8, 10 and 12. Viral shedding in NS and BAL samples were determined by plaque assay using fresh samples. On Day 28 post-inoculation AGMs were challenged with wt SARS-CoV-2. Nasal swabs were obtained every day from Day 29 through 38. Bronchoalveolar lavage was obtained on alternate days starting on Day 30 to Day 38. RT-qPCR was used for detecting SARS-CoV-2 shedding in NS and BAL samples.

[0039] FIGS. 11A-B provides graphs showing attenuation of MV-014-212 in the upper and lower respiratory tract of African Green Monkeys (AGM). Viral titer in nasal swabs (FIG. 11A) or bronchoalveolar lavage (BAL) (FIG. 11B) from AGMs following inoculation with MV-014-212 or wt RSV A2 were measured by plaque assay on Vero cells. On Days 1 through 12 post-inoculation nasal swabs were collected in Williams E supplemented with SPG. Viral titer in BAL were measured on Days 2, 4, 6, 8, 10, and 12 post-inoculation. The box in the graph defines the 25th and 75th percentile with error bars showing the maximum and minimum values. The horizontal line in the box is the mean value of the data points for each time point. The dotted line represents the LOD (50 PFU/mL).

[0040] FIGS. 12A-D show graphs of the results of two independent experiments performed in cotton rats. In experiment 1, cotton rats (n=5 per group) were inoculated with 1×10⁵ PFU of biologically derived TN-12, Memphis 37 (M37) or recombinant A2 (rA2) RSV strains. On Day 3, 5 and 7 cotton rat nasal and lung tissues were homogenized in HBSS+10% SPG for titer determination by plaque assay. In this experiment only Day 5 nasal and lung tissues were collected for the rA2 group. In experiment 2, cotton rats (n=6) were inoculated with 5×10⁵ PFU of rA2. On Day 2, 5 and 7 cotton rat nasal and lung tissues were homogenized in HBSS+10% SPG for titer determination by plaque assay. Plaque assay was performed in HEp-2 cells using clarified nasal and lung homogenates diluted in EMEM. Plaques were visualized by immunostaining with RSV polyclonal antibodies in experiment 1 and by crystal violet staining in experiment 2. FIG. 12A shows replication kinetics of TN-12, M37 and rA2 in the nose. FIG. 12B compares nasal titers of TN-12, M37 and rA2 on day 5. FIG. 12C shows replication kinetics of biological TN-12 and Memphis 37 and rA2 in the lungs. FIG. 12D compares lung titers on day 5 of TN-12, M37 and rA2. The result showed that the rA2 nose titers were comparable to biologically derived TN12 and M37 but rA2 lung titers were approximately 2 log lower compared to biologically derived RSV strains.

[0041] FIG. 13 provides graphs demonstrating the protection of MV-014-212 vaccinated AGMs against wt SARS-CoV-2 challenge. wt SARS-CoV-2 sgRNA in nasal swab samples from AGMs inoculated with MV-014-212, wt RSV A2 or PBS (Mock) following challenge. At Day 28, animals were challenged with 1.0×10⁶ TCID₅₀ of wt SARS-CoV-2 by intranasal and intratracheal inoculation. Nasal swabs collected on Days 1, 2, 4, and 6 post-challenge with wt SARS-CoV-2 were shown. The level of SARS-CoV-2 sgRNA was determined by RT-qPCR. The dashed line represents the LOD of 50 genome equivalents (GE)/mL. (sgRNA=sub-genomic RNA.)

[0042] FIG. 14A is a schematic showing a sandwich assay used to measure spike-specific nasal IgA. The SARS-CoV-2 spike protein is used as the antigen (2) that binds IgA from a sample (e.g., nasal swab sample). An IgA standard curve was generated by replacing the spike protein with an IgA capture Ab (FIG. 14B), with “OD at 450 nm” on the Y-axis and “[IgA] (pg/mL)” on the x-axis.

[0043] FIG. 15A provides a graph showing spike specific serum IgG in MV-014-212-inoculated AGMs. Antibodies specific to SARS-CoV-2 spike protein were measured by ELISA using serum collected on Day 25 from AGM inoculated with MV-014-212, wt RSV A2, or PBS (mock). The titer is expressed as ELISA units (ELU)/mL that were calculated by comparison to a standard curve generated from pooled human convalescent serum. FIG. 15B provides a graph showing measurement of IgA antibodies specific to SARS-CoV-2 spike protein by ELISA using nasal swabs collected on Day 25 post inoculation. The Log 2 of the ratio of the values obtained at day 25 over day 1 are shown. The calculated ELU/mL concentration was obtained from standard curve generated from total purified human IgA using a capture ELISA. FIG. 15C provides graphs showing neutralization titres (NT50) with sera from two AGM immunized with MV-014-212, before (“pre”) and 25 days after immunization (“imm”) with MV-014-212. WHO std is a human convalescent serum cocktail control at 100 IU/mL. NT50 were obtained from fitting the inhibition curves to the option “[Inhibitor] vs. normalized response—Variable slope” in GraphPad Prism. WHO Std. is a pool of convalescent sera at 100 IU/mL. The % Inhibition was calculated as described in Example 3 and the inhibition curves are shown in FIG. 16. The curves corresponding to samples AGM #1 Pre (all viruses) and AGM #2 (RSV) did not show significant inhibition and could not be fitted. LOD is 5, indicated with a horizontal dashed line. The data represents the average of two replicates and the error bars correspond to S.D. The table on the right shows the average NT50 for each reporter virus.

[0044] FIG. 16 provides graphs showing neutralizing curves. The percentage of inhibition was calculated as described in Methods. The inhibition curves shown below were fitted using non-linear regression with the option “[Inhibitor] vs. normalized response—Variable slope” in GraphPad Prism. The measures correspond to the average of 2 replicates and the error bars are SD. The reporter virus corresponding to each assay is shown on top. The WHO STD is a pool of convalescent sera at 100 IU/mL.

[0045] FIG. 17 provides graphs showing neutralization assays with sera from AGMs #1 and #2, before (“pre”) and 25 days after immunization (“imm”) with MV-014-212. WHO std is a human convalescent serum cocktail control at 100 IU/mL. The graphs show the inhibition achieved with the highest concentration of serum or control (1:5). The percentage of inhibition was calculated as described in Methods. The data represents the average of two replicates and the error bars correspond to S.D.

[0046] FIG. 18 is a schematic of the neutralization assay as described in Example 3.

[0047] FIGS. 19A-D provide graphs showing that MV-014-212 elicited a Th1-biased immune response in ACE-2 mice. FIG. 19A shows ELISpot results for IFNg (left) or IL-5 (right) producing cells in ACE-2 mice. Splenocytes isolated from hACE-2 expressing mice (n=5) were collected on Day 28 post-inoculation and stimulated with a peptide pool that spanned the SARS-CoV-2 spike protein (pool), media, or the mitogen concanavalin A (Con A). IL-5 or IFNγ expressing T-cells were quantified by ELISpot assay. hACE-2 expressing mice were inoculated at Day 0 via the intranasal route with MV-014-212 or PBS. Control mice were vaccinated with purified SARS-CoV-2 spike protein adjuvanted with alum by intramuscular injection at Day −20 and Day 0. FIG. 19B provides a graph showing the log of the ratio of IFNγ to IL-5 expressing cells (as shown in FIG. 19A). FIG. 19C provides a graph showing the results of IgG1 and IgG2a ELISAs. Levels of IgG2a (left panel) and IgG1 (right panel) corresponding to Day 28 serum from hACE-2 mice vaccinated intranasally with PBS or MV-014-212 or intramuscularly with spike-alum, as determined by ELISA. The concentration of each immunoglobulin isotype was determined from standard curves generated with purified SARS-CoV-2 spike specific monoclonal IgG2a or IgG1 antibodies. FIG. 19D provides a graph showing the log of the ratio of IgG2a/IgG1 (as shown in FIG. 19C). Statistical analysis is a paired t-test. ***P<0.0005

### DETAILED DESCRIPTION

[0048] The disclosure is based, in part, on the discovery of a chimeric protein comprising portions of two viral fusion proteins which can be used in an immunogenic composition (e.g., a vaccine) for the prevention of a viral infection. The chimeric proteins described herein can be used in a vaccine construct that includes components of an RSV virus (e.g. codon-deoptimized RSV proteins) but that expresses the chimeric fusion protein on the surface of the virus. The chimeric protein, having a portion of a first fusion protein (e.g., an ectodomain of a fusion protein) and a portion of a second fusion protein (e.g., a cytoplasmic tail of a second fusion protein), promotes proper assembly of the chimeric protein into RSV particles.

[0049] In certain embodiments, the disclosure relates to a chimeric protein comprising a non-RSV fusion protein (e.g., a coronavirus spike protein or “S protein”; e.g., a SARS-CoV-2 spike protein) and an RSV F protein which can be used in an immunogenic composition (e.g., a vaccine) for the prevention of a viral infection (e.g., a SARS-CoV-2 infection). The chimeric proteins described herein can be used in a vaccine construct that includes components of an RSV virus (e.g. codon-deoptimized RSV proteins) but that expresses the fusion protein (e.g., the S protein) on the surface of the virus. The chimeric protein, having a portion of a non-RSV fusion protein (e.g., coronavirus S protein) and a portion of an RSV F protein, promotes proper assembly of the chimeric protein into RSV particles.

[0050] The disclosure further relates to nucleic acids encoding a chimeric protein comprising a portion (e.g., an ectodomain) of a first fusion protein and a portion (e.g., a cytoplasmic tail) of a second fusion protein and immunogenic compositions (e.g., vaccines) comprising the same. In certain embodiments, the immunogenic composition comprises RSV genes in addition to or other than the F gene, which may be codon deoptimized. Although the immunogenic compositions described herein can, in certain embodiments, include a G gene, in other embodiments, the immunogenic composition (e.g., vaccine) does not include an RSV G gene. Without wishing to be bound by theory, it is believed that the RSV G gene is not needed, because certain fusion proteins, such as the coronavirus S protein, mediates both receptor attachment and virus-cell fusion. Indeed, the coronavirus spike protein is fully functional, necessary and sufficient for viral entry. A recombinant RSV-spike virus lacking G and F proteins can enter host cells, as described in Example 2 herein, indicating that the recombinant virus relies entirely on the chimeric coronavirus spike/RSV F protein for entry. Further, by removing RSV G and F, the resulting immunogenic composition should not be inhibited by pre-existing RSV immunity because known RSV neutralizing antibodies are primarily against F or against G.

[0051] Throughout the description, where compositions are described as having, including, or comprising specific components, or where processes and methods are described as having, including, or comprising specific steps, it is contemplated that, additionally, there are compositions of the present invention that consist essentially of, or consist of, the recited components, and that there are processes and methods according to the present invention that consist essentially of, or consist of, the recited processing steps.

[0052] In the application, where an element or component is said to be included in and/or selected from a list of recited elements or components, it should be understood that the element or component can be any one of the recited elements or components, or the element or component can be selected from a group consisting of two or more of the recited elements or components.

[0053] Further, it should be understood that elements and/or features of a composition or a method described herein can be combined in a variety of ways without departing from the spirit and scope of the present invention, whether explicit or implicit herein. For example, where reference is made to a particular compound, that compound can be used in various embodiments of compositions of the present invention and/or in methods of the present invention, unless otherwise understood from the context. In other words, within this application, embodiments have been described and depicted in a way that enables a clear and concise application to be written and drawn, but it is intended and will be appreciated that embodiments may be variously combined or separated without parting from the present teachings and invention(s). For example, it will be appreciated that all features described and depicted herein can be applicable to all aspects of the invention(s) described and depicted herein.

[0054] It should be understood that the expression “at least one of” includes individually each of the recited objects after the expression and the various combinations of two or more of the recited objects unless otherwise understood from the context and use. The expression “and/or” in connection with three or more recited objects should be understood to have the same meaning unless otherwise understood from the context.

[0055] The use of the term “include,” “includes,” “including,” “have,” “has,” “having,” “contain,” “contains,” or “containing,” including grammatical equivalents thereof, should be understood generally as open-ended and non-limiting, for example, not excluding additional unrecited elements or steps, unless otherwise specifically stated or understood from the context.

[0056] Where the use of the term “about” is before a quantitative value, the present invention also includes the specific quantitative value itself, unless specifically stated otherwise. As used herein, the term “about” refers to a ±10% variation from the nominal value unless otherwise indicated or inferred.

[0057] It should be understood that the order of steps or order for performing certain actions is immaterial so long as the present invention remain operable. Moreover, two or more steps or actions may be conducted simultaneously.

[0058] The use of any and all examples, or exemplary language herein, for example, “such as” or “including,” is intended merely to illustrate better the present invention and does not pose a limitation on the scope of the invention unless claimed. No language in the specification should be construed as indicating any non-claimed element as essential to the practice of the present invention.

[0059] Prior to describing the various embodiments, the following definitions are provided and should be used unless otherwise indicated.

[0060] The terms “protein” and “polypeptide” refer to compounds comprising amino acids joined via peptide bonds and are used interchangeably.

[0061] The term “portion” when used in reference to a protein (as in “a portion of a given protein”) refers to fragments of that protein. The fragments may range in size from four amino acid residues to the entire amino sequence lacking one amino acid.

[0062] The terms “chimeric respiratory syncytial virus (RSV)” or “chimeric coronavirus/RSV” refer to a nucleic acid that contains sufficient RSV genes to allow the genome or antigenome to replicate in host cells (e.g. Vero cells) and the sequence nucleic acid is altered to include at least one nucleic acid segment that contains a non-RSV (e.g., coronavirus) gene sequence or fragment. A chimeric RSV can include a non-RSV (e.g., coronavirus) and/or RSV gene wherein the codons are altered to be different from those naturally occurring even though the gene produces a polypeptide with an identical amino acid sequence to those naturally expressed. Different strains of chimeric RSV will have different nucleotide sequences and express proteins with different amino acid sequences that have similar functions. Thus, a chimeric RSV includes an non-RSV (e.g., coronavirus) gene and/or RSV gene wherein one or more genes from one strain are replaced from genes in alternative or second strain such that the nucleic acid sequence of the entire non-RSV or RSV genome is not identical to a non-RSV (e.g., coronavirus) or RSV found in nature. In certain embodiments, the chimeric RSV includes those strains where nucleic acids are deleted after a codon for starting translation in order to truncate the proteins expression, provided such truncation pattern for the genome is not found in naturally occurring virus. In certain embodiments, the chimeric RSV includes those that are infectious and can replicate in a human subject. As used herein the term “non-RSV” refers to any virus that is not RSV. In certain embodiments, the non-RSV virus is a virus that is not in the pneumoviridae family (i.e., is a non-pneumovirus). Any instance of the term “non-RSV” present herein can, in certain embodiments, be substituted with the term “a virus outside of the pneumoviridae family” or “a virus that is not in the pneumoviridae family.”

[0063] The term “chimera” or “chimeric” when used in reference to a polypeptide refers to the expression product of two or more coding sequences obtained from different sources such that they do not exist together in a natural environment, that have been cloned together and that, after translation, act as a single polypeptide sequence. The coding sequences include those obtained from the same or from different species of organisms. The present disclosure relates to chimeric RSV proteins, e.g., non-RSV (e.g., coronavirus)/RSV proteins. In certain embodiments, the chimeric RSV protein comprises a non-RSV fusion protein or portion or variant thereof and an RSV F protein or portion (e.g. cytoplasmic tail portion) or variant thereof.

[0064] The term “fusion protein” refers to a viral protein that mediates fusion of a viral membrane and a cell membrane, allowing the virus to enter and infect a cell. Fusion proteins contemplated for use in the chimeric proteins herein include at least a portion of the HA protein of Orthomyxoviridae (e.g., influenza virus); the Env protein of Retroviridae; the F and/or HN proteins of Paramyxoviridae (e.g., parainfluenza, measles, and mumps viruses); the S protein of Coronaviridae; the GP protein of Filoviridae; the GP and/or SSP proteins of Arenaviridae; the E1/E2 protein of Togaviridae; the E (e.g., in TBEV) or E1/E2 (e.g., in HCV) protein of Flaviviridae; the GN/GC protein of Bunyaviridiae; the G protein of Rhabdoviridae (VSV and rabies); the gB, gD, and/or gH/L protein of Herpesviridae; one or more of a complex of 8 proteins in poxviridae; and the S and/or L protein of Hepadnaviridae.

[0065] The term “coronavirus” refers to a group of RNA viruses that cause diseases (e.g., in mammals and birds. Coronaviruses cause seasonal upper or lower respiratory tract infections that are subclinical to moderate in severity in the immunocompetent host. Human coronaviruses include HCoV-229E, -NL63, -OC43, -HKU1, Severe Acute Respiratory Syndrome (SARS)-CoV, Middle East Respiratory Syndrome (MERS)-CoV, and SARS-CoV-2. Where the term coronavirus is used herein, SARS-CoV-2 is contemplated as a specific embodiment.

[0066] The term “homolog” or “homologous” when used in reference to a polypeptide refers to a high degree of sequence identity between two polypeptides, or to a high degree of similarity between the three-dimensional structures or to a high degree of similarity between the active site and the mechanism of action. In a preferred embodiment, a homolog has a greater than 60% sequence identity, and more preferably greater than 75% sequence identity, and still more preferably greater than 90% sequence identity, with a reference sequence.

[0067] As applied to polypeptides or polynucleotides, the term “substantial identity” means that two peptide or nucleotide sequences, when optimally aligned, such as by the programs “GAP” (Genetics Computer Group, Madison, Wis.), “ALIGN” (DNAStar, Madison, Wis.), Jotun Hein (Hein (2001) Proc. Pacific Symp. Biocomput. 179-190), using default gap weights, share at least 80 percent sequence identity, preferably at least 90 percent sequence identity, more preferably at least 95 percent sequence identity, e.g., at least 96 percent identity, at least 97 percent identity, at least 98 percent identity, at least 99 percent identity, at least 99.5 percent identity, at least 99.9 percent identity. Preferably, for polypeptides, residue positions which are not identical differ by conservative amino acid substitutions.

[0068] The terms “variant” and “mutant” when used in reference to a polypeptide (or the polynucleotide encoding such a polypeptide) refer to an amino acid sequence (or encoded amino acid sequence) that differs by one or more amino acids from another, usually related polypeptide. The variant may have “conservative” changes, wherein a substituted amino acid has similar structural or chemical properties. One type of conservative amino acid substitutions refers to the interchangeability of residues having similar side chains. For example, a group of amino acids having aliphatic side chains is glycine, alanine, valine, leucine, and isoleucine; a group of amino acids having aliphatic-hydroxyl side chains is serine and threonine; a group of amino acids having amide-containing side chains is asparagine and glutamine; a group of amino acids having aromatic side chains is phenylalanine, tyrosine, and tryptophan; a group of amino acids having basic side chains is lysine, arginine, and histidine; and a group of amino acids having sulfur-containing side chains is cysteine and methionine. Preferred conservative amino acids substitution groups are: valine-leucine-isoleucine, phenylalanine-tyrosine, lysine-arginine, alanine-valine, and asparagine-glutamine. More rarely, a variant may have “non-conservative” changes (e.g., replacement of a glycine with a tryptophan). Similar minor variations may also include amino acid deletions or insertions (in other words, additions), or both. Guidance in determining which and how many amino acid residues may be substituted, inserted or deleted without abolishing biological activity may be found using computer programs well known in the art, for example, DNAStar software. Variants can be tested in functional assays. Preferred variants have less than 10%, and preferably less than 5%, and still more preferably less than 2% changes (whether substitutions, deletions, and so on).

[0069] The term “gene” refers to a nucleic acid (e.g., DNA or RNA) sequence that comprises coding sequences necessary for the production of an RNA, or a polypeptide or its precursor (e.g., proinsulin). A functional polypeptide can be encoded by a full length coding sequence or by any portion of the coding sequence as long as the desired activity or functional properties (e.g., enzymatic activity, ligand binding, signal transduction, etc.) of the polypeptide are retained. The term “portion” when used in reference to a gene refers to fragments of that gene. The fragments may range in size from a few nucleotides to the entire gene sequence minus one nucleotide. Thus, “a nucleotide comprising at least a portion of a gene” may comprise fragments of the gene or the entire gene.

[0070] The term “gene” also encompasses the coding regions of a structural gene and includes sequences located adjacent to the coding region on both the 5′ and 3′ ends for a distance of about 1 kb on either end such that the gene corresponds to the length of the full-length mRNA. The sequences which are located 5′ of the coding region and which are present on the mRNA are referred to as 5′ non-translated sequences. The sequences which are located 3′ or downstream of the coding region and which are present on the mRNA are referred to as 3′ non-translated sequences. The term “gene” encompasses both cDNA and genomic forms of a gene. A genomic form or clone of a gene contains the coding region interrupted with non-coding sequences termed “introns” or “intervening regions” or “intervening sequences.” Introns are segments of a gene which are transcribed into nuclear RNA (mRNA); introns may contain regulatory elements such as enhancers. Introns are removed or “spliced out” from the nuclear or primary transcript; introns therefore are absent in the messenger RNA (mRNA) transcript. The mRNA functions during translation to specify the sequence or order of amino acids in a nascent polypeptide.

[0071] In addition to containing introns, genomic forms of a gene may also include sequences located on both the 5′ and 3′ end of the sequences which are present on the RNA transcript. These sequences are referred to as “flanking” sequences or regions (these flanking sequences are located 5′ or 3′ to the non-translated sequences present on the mRNA transcript). The 5′ flanking region may contain regulatory sequences such as promoters and enhancers which control or influence the transcription of the gene. The 3′ flanking region may contain sequences which direct the termination of transcription, posttranscriptional cleavage and polyadenylation.

[0072] The term “heterologous gene” refers to a gene encoding a factor that is not in its natural environment (i.e., has been altered by the hand of man). For example, a heterologous gene includes a gene from one species introduced into another species. A heterologous gene also includes a gene native to an organism that has been altered in some way (e.g., mutated, added in multiple copies, linked to a non-native promoter or enhancer sequence, etc.). Heterologous genes are distinguished from endogenous genes in that the heterologous gene sequences are typically joined to nucleotide sequences comprising regulatory elements such as promoters that are not found naturally associated with the gene for the protein encoded by the heterologous gene or with gene sequences in the chromosome, or are associated with portions of the chromosome not found in nature (e.g., genes expressed in loci where the gene is not normally expressed).

[0073] The term “polynucleotide” refers to a molecule comprised of two or more deoxyribonucleotides or ribonucleotides, preferably more than three, and usually more than ten. The exact size will depend on many factors, which in turn depends on the ultimate function or use of the oligonucleotide. The polynucleotide may be generated in any manner, including chemical synthesis, DNA replication, reverse transcription, or a combination thereof. The term “oligonucleotide” generally refers to a short length of single-stranded polynucleotide chain although it may also be used interchangeably with the term “polynucleotide.”

[0074] The term “nucleic acid” refers to a polymer of nucleotides, or a polynucleotide, as described above. The term is used to designate a single molecule, or a collection of molecules. Nucleic acids may be single stranded or double stranded, and may include coding regions and regions of various control elements, as described below.

[0075] The term “nucleic acid encoding a gene” or “a nucleic acid encoding” a specified polypeptide refers to a nucleic acid sequence comprising the coding region of a gene or in other words the nucleic acid sequence which encodes a gene product. The coding region may be present in either a cDNA, genomic DNA or RNA form. When present in a DNA form, the oligonucleotide, polynucleotide, or nucleic acid may be single-stranded (i.e., the sense strand) or double-stranded. Suitable control elements such as enhancers/promoters, splice junctions, polyadenylation signals, etc. may be placed in close proximity to the coding region of the gene if needed to permit proper initiation of transcription and/or correct processing of the primary RNA transcript. Alternatively, the coding region utilized in the expression vectors of the present disclosure may contain endogenous enhancers/promoters, splice junctions, intervening sequences, polyadenylation signals, etc. or a combination of both endogenous and exogenous control elements.

[0076] The term “recombinant” when made in reference to a nucleic acid molecule refers to a nucleic acid molecule which is comprised of segments of nucleic acid joined together by means of molecular biological techniques. The term “recombinant” when made in reference to a protein or a polypeptide refers to a protein molecule which is expressed using a recombinant nucleic acid molecule.

[0077] The terms “complementary” and “complementarity” refer to polynucleotides (i.e., a sequence of nucleotides) related by the base-pairing rules. For example, for the sequence “A-G-T,” is complementary to the sequence “T-C-A.” Complementarity may be “partial,” in which only some of the nucleic acids' bases are matched according to the base pairing rules. Or, there may be “complete” or “total” complementarity between the nucleic acids. The degree of complementarity between nucleic acid strands has significant effects on the efficiency and strength of hybridization between nucleic acid strands. This is of particular importance in amplification reactions, as well as detection methods which depend upon binding between nucleic acids.

[0078] The term “homology” when used in relation to nucleic acids refers to a degree of complementarity. There may be partial homology or complete homology (i.e., identity). “Sequence identity” refers to a measure of relatedness between two or more nucleic acids or proteins, and is given as a percentage with reference to the total comparison length. The identity calculation takes into account those nucleotide or amino acid residues that are identical and in the same relative positions in their respective larger sequences. Calculations of identity may be performed by algorithms contained within computer programs such as “GAP” (Genetics Computer Group, Madison, Wis.) and “ALIGN” (DNAStar, Madison, Wis.). A partially complementary sequence is one that at least partially inhibits (or competes with) a completely complementary sequence from hybridizing to a target nucleic acid is referred to using the functional term “substantially homologous.” The inhibition of hybridization of the completely complementary sequence to the target sequence may be examined using a hybridization assay (Southern or Northern blot, solution hybridization and the like) under conditions of low stringency. A substantially homologous sequence or probe will compete for and inhibit the binding (i.e., the hybridization) of a sequence which is completely homologous to a target under conditions of low stringency. This is not to say that conditions of low stringency are such that non-specific binding is permitted; low stringency conditions require that the binding of two sequences to one another be a specific (i.e., selective) interaction. The absence of non-specific binding may be tested by the use of a second target which lacks even a partial degree of complementarity (e.g., less than about 30% identity); in the absence of non-specific binding the probe will not hybridize to the second non-complementary target.

[0079] The following terms are used to describe the sequence relationships between two or more polynucleotides: “reference sequence”, “sequence identity”, “percentage of sequence identity”, and “substantial identity”. A “reference sequence” is a defined sequence used as a basis for a sequence comparison; a reference sequence may be a subset of a larger sequence, for example, as a segment of a full-length cDNA sequence given in a sequence listing or may comprise a complete gene sequence. Generally, a reference sequence is at least 20 nucleotides in length, frequently at least 25 nucleotides in length, and often at least 50 nucleotides in length. Since two polynucleotides may each (1) comprise a sequence (i.e., a portion of the complete polynucleotide sequence) that is similar between the two polynucleotides, and (2) may further comprise a sequence that is divergent between the two polynucleotides, sequence comparisons between two (or more) polynucleotides are typically performed by comparing sequences of the two polynucleotides over a “comparison window” to identify and compare local regions of sequence similarity. A “comparison window”, as used herein, refers to a conceptual segment of at least 20 contiguous nucleotide positions wherein a polynucleotide sequence may be compared to a reference sequence of at least 20 contiguous nucleotides and wherein the portion of the polynucleotide sequence in the comparison window may comprise additions or deletions (i.e., gaps) of 20 percent or less as compared to the reference sequence (which does not comprise additions or deletions) for optimal alignment of the two sequences. Optimal alignment of sequences for aligning a comparison window may be conducted by the local homology algorithm of Smith and Waterman (Smith and Waterman, Adv. Appl. Math. 2: 482 (1981)) by the homology alignment algorithm of Needleman and Wunsch (Needleman and Wunsch, J. Mol. Biol. 48:443 (1970)), by the search for similarity method of Pearson and Lipman (Pearson and Lipman, Proc. Natl. Acad. Sci. (U.S.) 85:2444 (1988)), by computerized implementations of these algorithms (GAP, BESTFIT, FASTA, and TFASTA in the Wisconsin Genetics Software Package Release 7.0, Genetics Computer Group, 575 Science Dr., Madison, Wis.), or by inspection, and the best alignment (i.e., resulting in the highest percentage of homology over the comparison window) generated by the various methods is selected. The term “sequence identity” means that two polynucleotide sequences are identical (i.e., on a nucleotide-by-nucleotide basis) over the window of comparison.

[0080] In certain embodiments, term “percentage of sequence identity” is calculated by comparing two optimally aligned sequences over the window of comparison, determining the number of positions at which the identical nucleic acid base (e.g., A, T, C, G, U, or I) occurs in both sequences to yield the number of matched positions, dividing the number of matched positions by the total number of positions in the window of comparison (i.e., the window size), and multiplying the result by 100 to yield the percentage of sequence identity.

[0081] In certain embodiments, sequence “identity” refers to the number of exactly matching amino acids (expressed as a percentage) in a sequence alignment between two sequences of the alignment calculated using the number of identical positions divided by the greater of the shortest sequence or the number of equivalent positions excluding overhangs wherein internal gaps are counted as an equivalent position. For example, the polypeptides GGGGGG (SEQ ID NO: 19) and GGGGT (SEQ ID NO: 20) have a sequence identity of 4 out of 5 or 80%. For example, the polypeptides GGGPPP (SEQ ID NO: 21) and GGGAPPP (SEQ ID NO: 22) have a sequence identity of 6 out of 7 or 85%. In certain embodiments, any recitation of sequence identity expressed herein may be substituted for sequence similarity. Percent “similarity” is used to quantify the similarity between two sequences of the alignment. This method is identical to determining the identity except that certain amino acids do not have to be identical to have a match. Amino acids are classified as matches if they are among a group with similar properties according to the following amino acid groups: Aromatic—F Y W; hydrophobic—A V I L; Charged positive: R K H; Charged negative—D E; Polar—S T N Q.

[0082] The terms “substantial identity” as used herein denotes a characteristic of a polynucleotide sequence, wherein the polynucleotide comprises a sequence that has at least 85 percent sequence identity, preferably at least 90 to 95 percent sequence identity, more usually at least 99 percent sequence identity as compared to a reference sequence over a comparison window of at least 20 nucleotide positions, frequently over a window of at least 25-50 nucleotides, wherein the percentage of sequence identity is calculated by comparing the reference sequence to the polynucleotide sequence which may include deletions or additions which total 20 percent or less of the reference sequence over the window of comparison. The reference sequence may be a subset of a larger sequence, for example, as a segment of the full-length sequences of the compositions claimed in the present disclosure.

[0083] When used in reference to a double-stranded nucleic acid sequence such as a cDNA or genomic clone, the term “substantially homologous” refers to any probe that can hybridize to either or both strands of the double-stranded nucleic acid sequence under conditions of low to high stringency as described above.

[0084] When used in reference to a single-stranded nucleic acid sequence, the term “substantially homologous” refers to any probe that can hybridize (i.e., it is the complement of) the single-stranded nucleic acid sequence under conditions of low to high stringency as described above.

[0085] The terms “in operable combination”, “in operable order” and “operably linked” refer to the linkage of nucleic acid sequences in such a manner that a nucleic acid molecule capable of directing the transcription of a given gene and/or the synthesis of a desired protein molecule is produced. The term also refers to the linkage of amino acid sequences in such a manner so that a functional protein is produced.

[0086] The term “regulatory element” refers to a genetic element which controls some aspect of the expression of nucleic acid sequences. For example, a promoter is a regulatory element which facilitates the initiation of transcription of an operably linked coding region. Other regulatory elements are splicing signals, polyadenylation signals, termination signals, etc.

[0087] Transcriptional control signals in eukaryotes comprise “promoter” and “enhancer” elements. Promoters and enhancers consist of short arrays of DNA sequences that interact specifically with cellular proteins involved in transcription (Maniatis, et al., Science 236:1237, 1987). Promoter and enhancer elements have been isolated from a variety of eukaryotic sources including genes in yeast, insect, mammalian and plant cells. Promoter and enhancer elements have also been isolated from viruses and are found in prokaryotes. The selection of a particular promoter and enhancer depends on the cell type used to express the protein of interest. Some eukaryotic promoters and enhancers have a broad host range while others are functional in a limited subset of cell types (for review, see Voss, et al., Trends Biochem. Sci., 11:287, 1986; and Maniatis, et al., supra 1987).

[0088] The terms “promoter element,” “promoter,” or “promoter sequence” as used herein, refer to a DNA sequence that, e.g., functions as a switch, activating the expression of a gene. If the gene is activated, it is said to be transcribed, or participating in transcription. Transcription involves the synthesis of mRNA from the gene. The promoter, therefore, serves as a transcriptional regulatory element and also provides a site for initiation of transcription of the gene into mRNA.

[0089] Promoters may be tissue specific or cell specific. The term “tissue specific” as it applies to a promoter refers to a promoter that is capable of directing selective expression of a nucleotide sequence of interest to a specific type of tissue (e.g., seeds) in the relative absence of expression of the same nucleotide sequence of interest in a different type of tissue (e.g., leaves). Tissue specificity of a promoter may be evaluated by, for example, operably linking a reporter gene to the promoter sequence to generate a reporter construct, introducing the reporter construct into the genome of an organism such that the reporter construct is integrated into every tissue of the resulting transgenic organism, and detecting the expression of the reporter gene (e.g., detecting mRNA, protein, or the activity of a protein encoded by the reporter gene) in different tissues of the transgenic organism. The detection of a greater level of expression of the reporter gene in one or more tissues relative to the level of expression of the reporter gene in other tissues shows that the promoter is specific for the tissues in which greater levels of expression are detected. The term “cell type specific” as applied to a promoter refers to a promoter which is capable of directing selective expression of a nucleotide sequence of interest in a specific type of cell in the relative absence of expression of the same nucleotide sequence of interest in a different type of cell within the same tissue. The term “cell type specific” when applied to a promoter also means a promoter capable of promoting selective expression of a nucleotide sequence of interest in a region within a single tissue. Cell type specificity of a promoter may be assessed using methods well known in the art, e.g., immunohistochemical staining. Briefly, tissue sections are embedded in paraffin, and paraffin sections are reacted with a primary antibody which is specific for the polypeptide product encoded by the nucleotide sequence of interest whose expression is controlled by the promoter. A labeled (e.g., peroxidase conjugated) secondary antibody which is specific for the primary antibody is allowed to bind to the sectioned tissue and specific binding detected (e.g., with avidin/biotin) by microscopy.

[0090] Promoters may be constitutive or regulatable. The term “constitutive” when made in reference to a promoter means that the promoter is capable of directing transcription of an operably linked nucleic acid sequence in the absence of a stimulus (e.g., heat shock, chemicals, light, etc.). Typically, constitutive promoters are capable of directing expression of a transgene in substantially any cell and any tissue.

[0091] In contrast, a “regulatable” or “inducible” promoter is one which is capable of directing a level of transcription of an operably linked nucleic acid sequence in the presence of a stimulus (e.g., heat shock, chemicals, light, etc.) which is different from the level of transcription of the operably linked nucleic acid sequence in the absence of the stimulus.

[0092] The enhancer and/or promoter may be “endogenous” or “exogenous” or “heterologous.” An “endogenous” enhancer or promoter is one that is naturally linked with a given gene in the genome. An “exogenous” or “heterologous” enhancer or promoter is one that is placed in juxtaposition to a gene by means of genetic manipulation (i.e., molecular biological techniques) such that transcription of the gene is directed by the linked enhancer or promoter. For example, an endogenous promoter in operable combination with a first gene can be isolated, removed, and placed in operable combination with a second gene, thereby making it a “heterologous promoter” in operable combination with the second gene. A variety of such combinations are contemplated (e.g., the first and second genes can be from the same species, or from different species).

[0093] Efficient expression of recombinant DNA sequences in eukaryotic cells can require expression of signals directing the efficient termination and polyadenylation of the resulting transcript. Transcription termination signals are generally found downstream of the polyadenylation signal and are a few hundred nucleotides in length. The term “poly(A) site” or “poly(A) sequence” as used herein denotes a DNA sequence which directs both the termination and polyadenylation of the nascent RNA transcript. Efficient polyadenylation of the recombinant transcript is desirable, as transcripts lacking a poly(A) tail are unstable and are rapidly degraded. The poly(A) signal utilized in an expression vector may be “heterologous” or “endogenous.” An endogenous poly(A) signal is found naturally at the 3′ end of the coding region of a given gene in the genome. A heterologous poly(A) signal is one which has been isolated from one gene and positioned 3′ to another gene. A commonly used heterologous poly(A) signal is the SV40 poly(A) signal. The SV40 poly(A) signal is contained on a 237 bp BamHI/BclI restriction fragment and directs both termination and polyadenylation.

[0094] The term “vector” refers to nucleic acid molecules that transfer DNA segment(s) from one cell to another. The term “vehicle” is sometimes used interchangeably with “vector.”

[0095] The terms “expression vector” or “expression cassette” refer to a recombinant nucleic acid containing a desired coding sequence and appropriate nucleic acid sequences used for the expression of the operably linked coding sequence in a particular host organism. Nucleic acid sequences used for expression in prokaryotes typically include a promoter, an operator (optional), and a ribosome binding site, often along with other sequences. Eukaryotic cells are known to utilize promoters, enhancers, and termination and polyadenylation signals.

[0096] The term “host cell” refers to any cell capable of replicating and/or transcribing and/or translating a heterologous gene. Thus, a “host cell” refers to any eukaryotic or prokaryotic cell (e.g., bacterial cells such as E. coli, yeast cells, mammalian cells, avian cells, amphibian cells, plant cells, fish cells, and insect cells), whether located in vitro or in vivo. For example, host cells may be located in a transgenic animal.

[0097] A “selectable marker” is a nucleic acid introduced into a recombinant vector that encodes a polypeptide that confers a trait suitable for artificial selection or identification (see also, “reporter gene” below), e.g., beta-lactamase confers antibiotic resistance, which allows an organism expressing beta-lactamase to survive in the presence antibiotic in a growth medium. Another example is thymidine kinase, which makes the host sensitive to ganciclovir selection. It may be a screenable marker that allows one to distinguish between wanted and unwanted cells based on the presence or absence of an expected color. For example, the lac-z-gene produces a beta-galactosidase enzyme which confers a blue color in the presence of X-gal (5-bromo-4-chloro-3-indolyl-β-D-galactoside). If recombinant insertion inactivates the lac-z-gene, then the resulting colonies are colorless. There may be one or more selectable markers, e.g., an enzyme that can complement to the inability of an expression organism to synthesize a particular compound required for its growth (auxotrophic) and one able to convert a compound to another that is toxic for growth. URA3, an orotidine-5′ phosphate decarboxylase, is necessary for uracil biosynthesis and can complement ura3 mutants that are auxotrophic for uracil. URA3 also converts 5-fluoroorotic acid into the toxic compound 5-fluorouracil. Additional contemplated selectable markers include any genes that impart antibacterial resistance or express a fluorescent protein. Examples include, but are not limited to, the following genes: ampr, camr, tetr, blasticidinr, neor, hygr, abxr, neomycin phosphotransferase type II gene (nptII), p-glucuronidase (gus), green fluorescent protein (gfp), egfp, yfp, mCherry, p-galactosidase (lacZ), lacZa, lacZAM15, chloramphenicol acetyltransferase (cat), alkaline phosphatase (phoA), bacterial luciferase (luxAB), bialaphos resistance gene (bar), phosphomannose isomerase (pmi), xylose isomerase (xylA), arabitol dehydrogenase (atlD), UDP-glucose:galactose-1-phosphate uridyltransferaseI (galT), feedback-insensitive a subunit of anthranilate synthase (OASA1D), 2-deoxyglucose (2-DOGR), benzyladenine-N-3-glucuronide, E. coli threonine deaminase, glutamate 1-semialdehyde aminotransferase (GSA-AT), D-amino acidoxidase (DAAO), salt-tolerance gene (rstB), ferredoxin-like protein (pflp), trehalose-6-P synthase gene (AtTPS1), lysine racemase (lyr), dihydrodipicolinate synthase (dapA), tryptophan synthase beta 1 (AtTSB1), dehalogenase (dhlA), mannose-6-phosphate reductase gene (M6PR), hygromycin phosphotransferase (HPT), and D-serine ammonialyase (dsdA).

[0098] A “label” refers to a detectable compound or composition that is conjugated directly or indirectly to another molecule, such as an antibody or a protein, to facilitate detection of that molecule. Specific, non-limiting examples of labels include fluorescent tags, enzymatic linkages, and radioactive isotopes. In one example, a “label receptor” refers to incorporation of a heterologous polypeptide in the receptor. A label includes the incorporation of a radiolabeled amino acid or the covalent attachment of biotinyl moieties to a polypeptide that can be detected by marked avidin (for example, streptavidin containing a fluorescent marker or enzymatic activity that can be detected by optical or colorimetric methods). Various methods of labeling polypeptides and glycoproteins are known in the art and may be used. Examples of labels for polypeptides include, but are not limited to, the following: radioisotopes or radionucleotides (such as 35S or 131I) fluorescent labels (such as fluorescein isothiocyanate (FITC), rhodamine, lanthanide phosphors), enzymatic labels (such as horseradish peroxidase, beta-galactosidase, luciferase, alkaline phosphatase), chemiluminescent markers, biotinyl groups, predetermined polypeptide epitopes recognized by a secondary reporter (such as a leucine zipper pair sequences, binding sites for secondary antibodies, metal binding domains, epitope tags), or magnetic agents, such as gadolinium chelates. In some embodiments, labels are attached by spacer arms of various lengths to reduce potential steric hindrance.

[0099] An “immunogenic composition” refers to one or more nucleic acids or proteins capable of giving rise to an immune response in a subject. An immunogenic composition can include, for example, a virus or portion thereof (e.g., a live or dead virus, viral particle, or virus-like particle (VLP)) which, in certain embodiments, can be administered as a vaccine.

[0100] In certain embodiments, the disclosure relates to recombinant polypeptides comprising sequences disclosed herein or variants or fusions thereof wherein the amino terminal end or the carbon terminal end of the amino acid sequence are optionally attached to a heterologous amino acid sequence, label, or reporter molecule.

[0101] In certain embodiments, the disclosure relates to the recombinant vectors comprising a nucleic acid encoding a polypeptide disclosed herein or fusion protein thereof.

[0102] In certain embodiments, the recombinant vector optionally comprises a mammalian, human, insect, viral, bacterial, bacterial plasmid, yeast associated origin of replication or gene such as a gene or retroviral gene or lentiviral LTR, TAR, RRE, PE, SLIP, CRS, and INS nucleotide segment or gene selected from tat, rev, nef, vif, vpr, vpu, and vpx or structural genes selected from gag, pol, and env.

[0103] In certain embodiments, the recombinant vector optionally comprises a gene vector element (nucleic acid) such as a selectable marker region, lac operon, a CMV promoter, a hybrid chicken B-actin/CMV enhancer (CAG) promoter, tac promoter, T7 RNA polymerase promoter, SP6 RNA polymerase promoter, SV40 promoter, internal ribosome entry site (IRES) sequence, cis-acting woodchuck post regulatory element (WPRE), scaffold-attachment region (SAR), inverted terminal repeats (ITR), FLAG tag coding region, c-myc tag coding region, metal affinity tag coding region, streptavidin binding peptide tag coding region, polyHis tag coding region, HA tag coding region, MBP tag coding region, GST tag coding region, polyadenylation coding region, SV40 polyadenylation signal, SV40 origin of replication, Col E1 origin of replication, f1 origin, pBR322 origin, or pUC origin, TEV protease recognition site, loxP site, Cre recombinase coding region, or a multiple cloning site such as having 5, 6, or 7 or more restriction sites within a continuous segment of less than 50 or 60 nucleotides or having 3 or 4 or more restriction sites with a continuous segment of less than 20 or 30 nucleotides.

[0104] The term “reporter gene” refers to a gene encoding a protein that may be assayed. Examples of reporter genes include, but are not limited to, modified katushka, mkate and mkate2 (See, e.g., Merzlyak et al., (2007) Nat. Methods 4, 555-557 and Shcherbo et al. (2008) Biochem. J. 418, 567-574), luciferase (See, e.g., deWet et al., (1987) Mol. Cell. Biol. 7:725 and U.S. Pat. Nos. 6,074,859; 5,976,796; 5,674,713; and 5,618,682; all of which are incorporated herein by reference), green fluorescent protein (e.g., GenBank Accession Number U43284; a number of GFP variants are commercially available from ClonTech Laboratories, Palo Alto, Calif.), chloramphenicol acetyltransferase, beta-galactosidase, alkaline phosphatase, and horse radish peroxidase.

[0105] The term “wild-type” when made in reference to a gene refers to a gene which has the characteristics of a gene isolated from a naturally occurring source. The term “wild-type” when made in reference to a gene product refers to a gene product which has the characteristics of a gene product isolated from a naturally occurring source. The term “naturally-occurring” as used herein as applied to an object refers to the fact that an object can be found in nature. For example, a polypeptide or polynucleotide sequence that is present in an organism (including viruses) that can be isolated from a source in nature and which has not been intentionally modified by man in the laboratory is naturally-occurring. A wild-type gene is that which is most frequently observed in a population and is thus arbitrarily designated the “normal” or “wild-type” form of the gene. In contrast, the term “modified” or “mutant” when made in reference to a gene or to a gene product refers, respectively, to a gene or to a gene product which displays modifications in sequence and/or functional properties (i.e., altered characteristics) when compared to the wild-type gene or gene product. It is noted that naturally-occurring mutants can be isolated; these are identified by the fact that they have altered characteristics when compared to the wild-type gene or gene product.

[0106] The term “antisense” or “antigenome” refers to a nucleotide sequence whose sequence of nucleotide residues is in reverse 5′ to 3′ orientation in relation to the sequence of nucleotide residues in a sense strand. A “sense strand” of a DNA duplex refers to a strand in a DNA duplex which is transcribed by a cell in its natural state into a “sense mRNA.” Thus an “antisense” sequence is a sequence having the same sequence as the non-coding strand in a DNA duplex.

[0107] The term “isolated” refers to a biological material, such as a virus, a nucleic acid or a protein, which is substantially free from components that normally accompany or interact with it in its naturally occurring environment. The isolated material optionally comprises material not found with the material in its natural environment, e.g., a cell. For example, if the material is in its natural environment, such as a cell, the material has been placed at a location in the cell (e.g., genome or genetic element) not native to a material found in that environment. For example, a naturally occurring nucleic acid (e.g., a coding sequence, a promoter, an enhancer, etc.) becomes isolated if it is introduced by non-naturally occurring means to a locus of the genome (e.g., a vector, such as a plasmid or virus vector, or amplicon) not native to that nucleic acid. Such nucleic acids are also referred to as “heterologous” nucleic acids. An isolated virus, for example, is in an environment (e.g., a cell culture system, or purified from cell culture) other than the native environment of wild-type virus (e.g., the nasopharynx of an infected individual).

[0108] An “immunologically effective amount” of a virus or attenuated virus is an amount sufficient to enhance an individual's (e.g., a human's) own immune response against a subsequent exposure to the agent. Levels of induced immunity can be monitored, e.g., by measuring amounts of neutralizing secretory and/or serum antibodies, e.g., by plaque neutralization, complement fixation, enzyme-linked immunosorbent, or microneutralization assay.

[0109] A “protective immune response” against a virus refers to an immune response exhibited by an individual (e.g., a human) that is protective against serious lower respiratory tract disease (e.g., pneumonia and/or bronchiolitis) when the individual is subsequently exposed to and/or infected with wild-type virus.

### RSV

[0110] Naturally occurring RSV particles typically contain a viral genome within a helical nucleocapsid which is surrounded by matrix proteins and an envelope containing glycoproteins. The genome of human wild-type RSV encodes the proteins, NS1, NS2, N, P, M, SH, G, F, M2-1, M2-2, and L. G, F, and SH are glycoproteins. RSV polymerase activity consists of the large protein (L) and phosphoprotein (P). The viral M2-1 protein is used during transcription and is likely to be a component of the transcriptase complex. The viral N protein is used to encapsidate the nascent RNA during replication.

[0111] The genome is transcribed and replicated in the cytoplasm of a host cell. Host-cell transcription typically results in synthesis of ten methylated and polyadenylated mRNAs. The antigenome is positive-sense RNA complement of the genome produced during replication, which in turn acts as a template for genome synthesis. The viral genes are flanked by conserved gene-start (GS) and gene-end (GE) sequences. At the 3′ and 5′ ends of the genome are leader and trailer nucleotides. The wild type leader sequence contains a promoter at the 3′ end. When the viral polymerase reaches a GE signal, the polymerase polyadenylates and releases the mRNA and reinitiates RNA synthesis at the next GS signal. The L-P complex is believed to be responsible for recognition of the promoter, RNA synthesis, capping and methylation of the 5′ termini of the mRNAs and polyadenylation of their 3′ ends. It is believed that the polymerase sometimes dissociates from the gene at the junctions. Because the polymerase initiates transcription at the 3′ end of the genome, this results in a gradient of expression, with the genes at the 3′ end of the genome being transcribed more frequently than those at the 5′ end.

[0112] To replicate the genome, the polymerase does not respond to the cis-acting GE and GS signals and generates positive-sense RNA complement of the genome, the antigenome. At the 3′ end of the antigenome is the complement of the trailer, which contains a promoter. The polymerase uses this promoter to generate genome-sense RNA. Unlike mRNA, which is released as naked RNA, the antigenome and genome RNAs are encapsidated with virus nucleoprotein (N) as they are synthesized.

[0113] After translation of viral mRNAs, a full-length (+) antigenomic RNA is produced as a template for replication of the (−) RNA genome. Infectious recombinant RSV (rRSV) particles may be recovered from transfected plasmids. Co-expression of RSV N, P, L, and M2-1 proteins as well as the full-length antigenomic RNA is sufficient for RSV replication. See Collins et al., (1995) Proc Natl Acad Sci USA. 92(25):11563-11567 and U.S. Pat. No. 6,790,449.

### Chimeric Proteins

[0114] In certain embodiments, the disclosure relates to chimeric proteins comprising at least a portion of an ectodomain from one virus, and the cytoplasmic tail of a second virus. In certain embodiments, the chimeric protein further comprises a transmembrane domain from the first or the second virus. For example, in certain embodiments, at least a portion of an ectodomain and optionally a transmembrane domain is derived from the HA protein of Orthomyxoviridae (e.g., influenza virus); the Env protein of Retroviridae; the F and/or HN proteins of Paramyxoviridae (e.g., parainfluenza, measles and mumps viruses); the S protein of Coronaviridae (e.g., SARS-CoV-2); the GP protein of Filoviridae; the GP and/or SSP proteins of Arenaviridae; the E1/E2 protein of Togaviridae; the E (e.g., in TBEV) or E1/E2 (e.g., in HCV) protein of Flaviviridae; the GN/GC protein of Bunyaviridiae; the G protein of Rhabdoviridae (e.g., VSV and rabies virus); the gB, gD, and/or gH/L protein of Herpesviridae; one or more of a complex of 8 proteins in poxviridae; and the S and/or L protein of Hepadnaviridae. In certain embodiments, the cytoplasmic tail is derived from the HA protein of Orthomyxoviridae (e.g., influenza virus); the Env protein of Retroviridae; the F and/or HN proteins of Paramyxoviridae (e.g., parainfluenza, measles and mumps viruses); the S protein of Coronaviridae (e.g., SARS-CoV-2); the GP protein of Filoviridae; the GP and/or SSP proteins of Arenaviridae; the E1/E2 protein of Togaviridae; the E (e.g., in TBEV) or E1/E2 (e.g., in HCV) protein of Flaviviridae; the GN/GC protein of Bunyaviridiae; the G protein of Rhabdoviridae (e.g., VSV and rabies virus); the gB, gD, and/or gH/L protein of Herpesviridae; one or more of a complex of 8 proteins in poxviridae; and the S and/or L protein of Hepadnaviridae.

[0115] For example, in certain embodiments, the disclosure provides a chimeric protein comprising a non-RSV fusion protein and at least a portion of an RSV F protein, as well as nucleic acids encoding the chimeric protein. In certain embodiments, the disclosure contemplates recombinant vectors comprising nucleic acids encoding these proteins and cells comprising said vectors. In certain embodiments, the vector comprises a selectable marker or reporter gene.

[0116] In certain embodiments, the disclosure relates to a chimeric protein comprising an ectodomain of a non-RSV fusion protein and an RSV F protein cytoplasmic tail. In certain embodiments, the chimeric protein further comprises a transmembrane domain of a non-RSV fusion protein or an RSV F protein. In certain embodiments, the non-RSV fusion protein is the SARS-CoV-2 spike protein.

[0117] In certain embodiments, the disclosure relates to a chimeric protein comprising an ectodomain of a first non-RSV fusion protein (e.g., a coronavirus spike protein) and cytoplasmic tail from a second non-RSV fusion protein, e.g., the HA protein of Orthomyxoviridae (e.g., influenza); the F and/or HN proteins of Paramyxoviridae (e.g., parainfluenza, measles, and mumps); the S protein of Coronaviridae (e.g., SARS-CoV-2); the GP protein of Filoviridae; the GP and/or SSP proteins of Arenaviridae; the E1/E2 protein of Togaviridae; the E (e.g., in TBEV) or E1/E2 (e.g., in HCV) protein of Flaviviridae; the GN/GC protein of Bunyaviridiae; the G protein of Rhabdoviridae; the gB, gD, and/or gH/L protein of Herpesviridae; one or more of a complex of 8 proteins in poxviridae; and the S and/or L protein of Hepadnaviridae. In certain embodiments, the chimeric protein further comprises a transmembrane domain from the first or the second non-RSV fusion protein. In certain embodiments, the first non-RSV fusion protein is the SARS-CoV-2 spike protein.

[0118] In certain embodiments, the disclosure relates to a chimeric protein comprising (1) an ectodomain and optionally a transmembrane domain of a SARS-CoV-2 spike protein and (2) a cytoplasmic tail of an influenza virus HA protein, a parainfluenza virus F or HN protein, a measles virus F or HN protein, a mumps virus F or HN protein, a vesicular stomatitis virus (VSV) G protein, or a rabies virus G protein. In certain embodiments, the chimeric protein further comprises a transmembrane domain of the influenza virus, parainfluenza virus, measles virus, mumps virus, vesicular stomatitis virus (VSV), or rabies virus. Sequences of transmembrane and cytoplasmic domains of influenza virus, parainfluenza virus, measles virus, mumps virus, vesicular stomatitis virus (VSV), and rabies virus are known in the art. Exemplary cytoplasmic tail sequences for the foregoing are provided in TABLE 1. Other contemplated cytoplasmic tail sequences include those having at least about 80%, at least about 85%, at least about 90%, at least about 95%, at least about 96%, at least about 97% at least about 98%, or at least about 99% sequence identity to the cytoplasmic tail sequences in TABLE 1.

TABLE 1
Cytoplasmic Tail Sequences

| | SEQ | |
|---|---|---|
| Viral | ID | |
| Protein | NO | Cytoplasmic Tail Sequences |
| Influenza | 116 | X₁GX₂X₃X₄CX₅ICI; where X₁ is N or K; X₂ is S or N; X₃ is L, T, M, |
| virus HA | | or C; X₄ is Q or R; X₅ is R, n or T |
| protein | 117 | NGSX₁X₂CX₃ICI; where X₁ is L, C or M. X₂ is Q or R; X₃ is R or N |
| | 118 | X₁GNX₂RCX₃ICI; where X₁ is K, N or R, X₂ is I or M, X₃ is N, T or |
| | | Q |
| Parainfluenza | 119 | KLLTIVVANRNRMENFVYHK |
| virus F and/or | 120 | MVAEDAPVRATCRVLFRTT |
| HN protein | | |
| Measles virus | 121 | CCRGRCNKKGEQVGMSRPGLKPDLTGTSKSYVRSL |
| F and/or HN | 122 | MSPQRDRINAFYKDNPHPKGSRIVINREHLMIDR |
| protein | | |
| Mumps virus | 123 | YVATKEIRRINFKTNHINTISSSVDDLIRY |
| F and/or HN | 124 | MEPSKLFIMSDNATVAPGPVVNAAGKKTFRTCFR |
| protein | | |
| Vesicular | 125 | RVGIHLCIKLKHTKKRQIYTDIEMNRLGK |
| stomatitis | | |
| virus (VSV) | | |
| G protein | | |
| Rabies virus | 126 | MTAGAMIGLVLIFSLMTWCRRANRPESKQRSFGGTGRNVSVTS |
| G protein | | |

### Coronavirus Spike Protein and Portions Thereof for Use in a Chimeric Protein

[0119] In certain embodiments, the disclosure relates to certain desirable sequences of chimeric proteins comprising at least a portion of a coronavirus (e.g., SARS-CoV-2) spike protein and at least a portion of an RSV F protein and recombinant nucleic acids encoding the same. In certain embodiments, the disclosure contemplates recombinant vectors comprising nucleic acids encoding these polypeptides and cells comprising said vectors. In certain embodiments, the vector comprises a selectable marker or reporter gene.

[0120] In certain embodiments, the disclosure relates to a chimeric protein comprising a coronavirus (e.g., SARS-CoV-2) spike (S) protein ectodomain and transmembrane domain and an RSV F protein cytoplasmic tail.

[0121] As shown in the schematic in FIG. 1 (see spike gene portion), the coronavirus spike protein comprises an S1 domain and an S2 domain separated by a furin cleavage site (S1/S2). The S1 domain contains two subdomains: an N-terminal domain (NTD) and a receptor binding domain (RBD). The S2 domain contains two heptad repeats (HR1 and HR2), an S2′ cleavage site, and a CD26-interaction domain (“CD”), a fusion peptide (FP), and a transmembrane domain (TM).

[0122] In certain embodiments, the coronavirus spike protein comprises

(SEQ ID NO: 23)
MFVFLVLLPLVSSQCVNLTTRTQLPPAYTNSFTRGVYYPDKVFRSSVLHSTQDLFLPFFSNVTWFHA
IHVSGTNGTKRFDNPVLPFNDGVYFASTEKSNIIRGWIFGTTLDSKTQSLLIVNNATNVVIKVCEFQ
FCNDPFLGVYYHKNNKSWMESEFRVYSSANNCTFEYVSQPFLMDLEGKQGNFKNLREFVFKNIDGYF
KIYSKHTPINLVRDLPQGFSALEPLVDLPIGINITRFQTLLALHRSYLTPGDSSSGWTAGAAAYYVG
YLQPRTFLLKYNENGTITDAVDCALDPLSETKCTLKSFTVEKGIYQTSNFRVQPTESIVRFPNITNL
CPFGEVFNATRFASVYAWNRKRISNCVADYSVLYNSASFSTFKCYGVSPTKLNDLCFTNVYADSFVI
RGDEVRQIAPGQTGKIADYNYKLPDDFTGCVIAWNSNNLDSKVGGNYNYLYRLFRKSNLKPFERDIS
TETYQAGSTPCNGVEGFNCYFPLQSYGFQPTNGVGYQPYRVVVLSFELLHAPATVCGPKKSTNLVKN
KCVNFNFNGLTGTGVLTESNKKFLPFQQFGRDIADTTDAVRDPQTLEILDITPCSFGGVSVITPGTN
TSNQVAVLYQDVNCTEVPVAIHADQLTPTWRVYSTGSNVFQTRAGCLIGAEHVNNSYECDIPIGAGI
CASYQTQTNSPRRARSVASQSIIAYTMSLGAENSVAYSNNSIAIPTNFTISVTTEILPVSMTKTSVD
ILPDPSKPSKRSFIEDLLFNKVTLADAGFIKQYGDCLGDIAARDLICAQKFNGLTVLPPLLTDEMIA
QYTSALLAGTITSGWTFGAGAALQIPFAMQMAYRFNGIGVTQNVLYENQKLIANQFNSAIGKIQDSL
SSTASALGKLQDVVNQNAQALNTLVKQLSSNFGAISSVLNDILSRLDKVEAEVQIDRLITGRLQSLQ
TYVTQQLIRAAEIRASANLAATKMSECVLGQSKRVDFCGKGYHLMSFPQSAPHGVVFLHVTYVPAQE
KNFTTAPAICHDGKAHFPREGVFVSNGTHWFVTQRNFYEPQIITTDNTFVSGNCDVVIGIVNNTVYD
PLQPELDSFKEELDKYFKNHTSPDVDLGDISGINASVVNIQKEIDRLNEVAKNLNESLIDLQELGKY
EQYIKWPWYIWLGFIAGLIAIVMVTIMLCCMTSCCSCLKGCCSCGSCCKFDEDDSEPVLKGVKLHYT,

or a portion or variant thereof.

[0123] In certain embodiments, the portion of a coronavirus spike protein comprises amino acids 1-1210 of SEQ ID NO: 23, amino acids 1-1254 of SEQ ID NO: 23, 1-1241 of SEQ ID NO: 23, 1-1240 of SEQ ID NO: 23, or 1-1260 of SEQ ID NO: 23.

[0124] In certain embodiments, the portion of a coronavirus spike protein comprises a deletion of the furin cleavage site (PRRA (SEQ ID NO: 137)) (see amino acids 681-684 of SEQ ID NO: 23 and schematic at FIG. 9), or a mutation in the furin cleavage site (e.g., R682Q which changes the furin cleavage site from PRRA (SEQ ID NO: 137) to PQRA (SEQ ID NO: 138)). In certain embodiments, the portion of the coronavirus spike protein comprises a deletion of the amino acid P, a deletion of one of the two R amino acids, a deletion of the amino acid A, a deletion of the amino acids PR, RR, RA, PRR, or RRA of the furin cleave site. In certain embodiments, the portion of the coronavirus spike protein comprises a substitution of the amino acid P, a substitution of one or both of the two R amino acids, a substitution of the amino acid A, or any combination thereof. In certain embodiments, an amino acid of the furin cleavage site is substituted with the amino acid Q.

[0125] In certain embodiments, the portion of a coronavirus spike protein comprises one or more amino acid substitutions at positions corresponding to L5, S13, L18, T19, T20, P26, A67, D80, T95, D138, G142, W152, E154, F157, R158, R190, D215, D253, R246, K417, L452, L453, S477, T478, E484, N501, F565, A570, D614, H655, Q677, P681, A701, T716, T791, T859, F888, D950, S982, T1027I, Q1071, D1118, V1176, and/or a deletion of one or more of amino acids 69 and 70, 144, 156, and 157, wherein the amino acid numbering corresponds to SEQ ID NO: 23. In certain embodiments, the portion of a coronavirus spike protein comprises one or more of the following amino acid substitutions: L5F, S13I, L18F, T19R, T20N, P26S, A67V, D80A, D80G, T95I, D138Y, G142D, W152C, E154K, F157S, R158G, R190S, D215G, R246I, D253G, K417N, K417T, L452R, S477N, T478K, E484K, E484Q, N501Y, F565L, A570D, D614G, H655Y, Q677H, P681H, P681R, A701V, T716I, T791I, T859N, F888L, D950H, D950N, S982A, T1027I, Q1071H, and D1118H, Vi 176F, wherein the amino acid numbering corresponds to SEQ ID NO: 23.

[0126] In certain embodiments, the portion of a coronavirus spike protein comprises a combination of amino acid substitutions and/or deletions shown in any of the variants listed in TABLE 2.

TABLE 2

| | Amino Acid Position for | Exemplary Substitutions |
|---|---|---|
| Variant | Substitution or Deletion | and Deletions |
| B.1.1.7 | H69, V70, Y144, N501, | H69del, V70del, Y144del, |
| | A570, P681, T716, S982, | N501Y, A570D, P681H, |
| | D1118 | T716I, S982A, D1118H |
| B.1.351 | L18, D80, D215, R246, | L18F, D80A, D215G, R246I, |
| full | K417, E484, N501, A701 | K417T, E484K, N501Y, |
| | | A701V |
| B.1.351 | K417, E484, N501 | K417T, E484K, N501Y |
| partial | | |
| CAL20.C | S13, W152, L452 | S13I, W152C, L452R |
| P.1 full | L18, T20, P26, D138, | L18F, T20N, P26S, D138Y, |
| | R190, K417, E484, N501, | R190S, K417T, E484K, |
| | H655, T1027 | N501Y, H655Y, T1027I |
| P.1 partial | K417, E484, N501, | K417T, E484K, N501Y |
| B.1.526 | L5, T95, D253, S477, E484, | L5F, T95I, D253G, S477N, |
| full | D614, A701 | E484K, D614G, A701V |
| B.1.526 | T95, D253, D614 | T95I, D253G, D614G, |
| partial | | |
| B.1.526.1 | D80, Y144, F157, L452, | D80G, Y144del, F157S, |
| full | D614, T791, T859, D950 | L452R, D614G, T791I, |
| | | T859N, D950H |
| B.1.526.1 | D80, Y144, F157, L452, | D80G, Y144del, F157S, |
| partial | D614, D950 | L452R, D614G, D950H |
| B1.525 | A67, H69, V70, Y144, E484, | A67V, 69/70del, Y144del, |
| | D614, Q677, F888 | E484K, D614G, Q677H, |
| | | F888L |
| P.2 full | E484, F565, D614, V1176 | E484K, F565L, D614G, |
| | | V1176F |
| P.2 partial | E484, D614, V1176 | E484K, D614G, V1176F |
| B.1.617 | L452, E484, D614 | L452R, E484Q, D614G |
| B.1.617.1 | T95, G142, E154, L452, | T95I, G142D, E154K, |
| full | E484, D614, P681, Q1071 | L452R, E484Q, D614G, |
| | | P681R, Q1071H |
| B.1.617.1 | G142, E154, L452, E484, | G142D, E154K, L452R, |
| partial | D614, P681, Q1071 | E484Q, D614G, P681R, |
| | | Q1071H |
| B.1.617.2 | T19, G142, E156, F157, | T19R, G142D, E156del, |
| full | R158, L452, T478, D614, | F157del, R158G, L452R, |
| | P681, D950 | T478K, D614G, P681R, |
| | | D950N |
| B.1.617.2 | T19, E156, F157, R158, | T19R, E156del, F157del, |
| partial | L452, T478, D614, P681, | R158G, L452R, T478K, |
| | D950 | D614G, P681R, D950N |
| B.1.617.3 | T19, G142, L452, E484, | T19R, G142D, L452R, |
| | D614, P681, D950 | E484Q, D614G, P681R, |
| | | D950N |

[0127] In certain embodiments, the chimeric protein comprises a coronavirus spike protein as described herein, or a portion thereof (e.g., a fragment thereof comprising at least about 200 amino acids, at least about 300 amino acids, at least about 400 amino acids, at least about 500 amino acids, at least about 600 amino acids, at least about 700 amino acids, at least about 800 amino acids, at least about 900 amino acids, at least about 1000 amino acids, at least about 1100 amino acids, at least about 1200 amino acids, at least about 1210 amino acids, at least about 1220 amino acids, at least about 1230 amino acids, at least about 1240 amino acids, at least about 1250 amino acids, at least about 1260 amino acids, or at least about 1270 amino acids), or a variant thereof (e.g., a coronavirus spike protein comprising at least about 80%, at least about 85%, at least about 90%, at least about 95%, at least about 96%, at least about 97%, at least about 98%, or at least about 99% sequence identity thereto). In certain embodiments, the spike protein is truncated by about 1-100 amino acids, by about 1-90 amino acids, by about 1-80 amino acids, by about 1-70 amino acids, by about 1-60 amino acids, or by about 1-50 amino acids, for example, by about 1, about 2, about 3, about 4, about 5 about 6, about 7, about 8, about 9, or about 10 amino acids.

[0128] In certain embodiments, the coronavirus spike protein is encoded by SEQ ID NO: 24 or a portion or variant thereof having at least about 80%, at least about 85%, at least about 90%, at least about 95%, at least about 96%, at least about 97%, at least about 98%, or at least about 99% sequence identity thereto.

(SEQ ID NO: 24)
ATGTTTGTTTTTCTTGTTTTATTGCCACTAGTCTCTAGTCAGTGTGTTAATCTTACAACCAGAACTC
AATTACCCCCTGCATACACTAATTCTTTCACACGTGGTGTTTATTACCCTGACAAAGTTTTCAGATC
CTCAGTTTTACATTCAACTCAGGACTTGTTCTTACCTTTCTTTTCCAATGTTACTTGGTTCCATGCT
ATACATGTCTCTGGGACCAATGGTACTAAGAGGTTTGATAACCCTGTCCTACCATTTAATGATGGTG
TTTATTTTGCTTCCACTGAGAAGTCTAACATAATAAGAGGCTGGATTTTTGGTACTACTTTAGATTC
GAAGACCCAGTCCCTACTTATTGTTAATAACGCTACTAATGTTGTTATTAAAGTCTGTGAATTTCAA
TTTTGTAATGATCCATTTTTGGGTGTTTATTACCACAAAAACAACAAAAGTTGGATGGAAAGTGAGT
TCAGAGTTTATTCTAGTGCGAATAATTGCACTTTTGAATATGTCTCTCAGCCTTTTCTTATGGACCT
TGAAGGAAAACAGGGTAATTTCAAAAATCTTAGGGAATTTGTGTTTAAGAATATTGATGGTTATTTT
AAAATATATTCTAAGCACACGCCTATTAATTTAGTGCGTGATCTCCCTCAGGGTTTTTCGGCTTTAG
AACCATTGGTAGATTTGCCAATAGGTATTAACATCACTAGGTTTCAAACTTTACTTGCTTTACATAG
AAGTTATTTGACTCCTGGTGATTCTTCTTCAGGTTGGACAGCTGGTGCTGCAGCTTATTATGTGGGT
TATCTTCAACCTAGGACTTTTCTATTAAAATATAATGAAAATGGAACCATTACAGATGCTGTAGACT
GTGCACTTGACCCTCTCTCAGAAACAAAGTGTACGTTGAAATCCTTCACTGTAGAAAAAGGAATCTA
TCAAACTTCTAACTTTAGAGTCCAACCAACAGAATCTATTGTTAGATTTCCTAATATTACAAACTTG
TGCCCTTTTGGTGAAGTTTTTAACGCCACCAGATTTGCATCTGTTTATGCTTGGAACAGGAAGAGAA
TCAGCAACTGTGTTGCTGATTATTCTGTCCTATATAATTCCGCATCATTTTCCACTTTTAAGTGTTA
TGGAGTGTCTCCTACTAAATTAAATGATCTCTGCTTTACTAATGTCTATGCAGATTCATTTGTAATT
AGAGGTGATGAAGTCAGACAAATCGCTCCAGGGCAAACTGGAAAGATTGCTGATTATAATTATAAAT
TACCAGATGATTTTACAGGCTGCGTTATAGCTTGGAATTCTAACAATCTTGATTCTAAGGTTGGTGG
TAATTATAATTACCTGTATAGATTGTTTAGGAAGTCTAATCTCAAACCTTTTGAGAGAGATATTTCA
ACTGAAATCTATCAGGCCGGTAGCACACCTTGTAATGGTGTTGAAGGTTTTAATTGTTACTTTCCTT
TACAATCATATGGTTTCCAACCCACTAATGGTGTTGGTTACCAACCATACAGAGTAGTAGTACTTTC
TTTTGAACTTCTACATGCACCAGCAACTGTTTGTGGACCTAAAAAGTCTACTAATTTGGTTAAAAAC
AAATGTGTCAATTTCAACTTCAATGGTTTAACAGGCACAGGTGTTCTTACTGAGTCTAACAAAAAGT
TTCTGCCTTTCCAACAATTTGGCAGAGACATTGCTGACACTACTGATGCTGTCCGTGATCCACAGAC
ACTTGAGATTCTTGACATTACACCATGTTCTTTTGGTGGTGTCAGTGTTATAACACCAGGAACAAAT
ACTTCTAACCAGGTTGCTGTTCTTTATCAGGATGTTAACTGCACAGAAGTCCCTGTTGCTATTCATG
CAGATCAACTTACTCCTACTTGGCGTGTTTATTCTACAGGTTCTAATGTTTTTCAAACACGTGCAGG
CTGTTTAATAGGGGCTGAACATGTCAACAACTCATATGAGTGTGACATACCCATTGGTGCAGGTATA
TGCGCTAGTTATCAGACTCAGACTAATTCTCCTCGGCGGGCACGTAGTGTAGCTAGTCAATCCATCA
TTGCCTACACTATGTCACTTGGTGCAGAAAATTCAGTTGCTTACTCTAATAACTCTATTGCCATACC
CACAAATTTTACTATTAGTGTTACCACAGAAATTCTACCAGTGTCTATGACCAAGACATCAGTAGAT
TGTACAATGTACATTTGTGGTGATTCAACTGAATGCAGCAATCTTTTGTTGCAATATGGCAGTTTTT
GTACACAATTAAACCGTGCTTTAACTGGAATAGCTGTTGAACAAGACAAAAACACCCAAGAAGTTTT
TGCACAAGTCAAACAAATTTACAAAACACCACCAATTAAAGATTTTGGTGGTTTTAATTTTTCACAA
ATATTACCAGATCCATCAAAACCAAGCAAGAGGTCATTTATTGAAGATCTACTTTTCAACAAAGTGA
CACTTGCAGATGCTGGCTTCATCAAACAATATGGTGATTGCCTTGGTGATATTGCTGCTAGAGACCT
CATTTGTGCACAAAAGTTTAACGGCCTTACTGTTTTGCCACCTTTGCTCACAGATGAAATGATTGCT
CAATACACTTCTGCACTGTTAGCGGGTACAATCACTTCTGGTTGGACCTTTGGTGCAGGTGCTGCAT
TACAAATACCATTTGCTATGCAAATGGCTTATAGGTTTAATGGTATTGGAGTTACACAGAATGTTCT
CTATGAGAACCAAAAATTGATTGCCAACCAATTTAATAGTGCTATTGGCAAAATTCAAGACTCACTT
TCTTCCACAGCAAGTGCACTTGGAAAACTTCAAGATGTGGTCAACCAAAATGCACAAGCTTTAAACA
CGCTTGTTAAACAACTTAGCTCCAATTTTGGTGCAATTTCAAGTGTTTTAAATGATATCCTTTCACG
TCTTGACAAAGTTGAGGCTGAAGTGCAAATTGATAGGTTGATCACAGGCAGACTTCAAAGTTTGCAG
ACATATGTGACTCAACAATTAATTAGAGCTGCAGAAATCAGAGCTTCTGCTAATCTTGCTGCTACTA
AAATGTCAGAGTGTGTACTTGGACAATCAAAAAGAGTTGATTTTTGTGGAAAGGGCTATCATCTTAT
GTCCTTCCCTCAGTCAGCACCTCATGGTGTAGTCTTCTTGCATGTGACTTATGTCCCTGCACAAGAA
AAGAACTTCACAACTGCTCCTGCCATTTGTCATGATGGAAAAGCACACTTTCCTCGTGAAGGTGTCT
TTGTTTCAAATGGCACACACTGGTTTGTAACACAAAGGAATTTTTATGAACCACAAATCATTACTAC
AGACAACACATTTGTGTCTGGTAACTGTGATGTTGTAATAGGAATTGTCAACAACACAGTTTATGAT
CCTTTGCAACCTGAATTAGACTCATTCAAGGAGGAGTTAGATAAATATTTTAAGAATCATACATCAC
CAGATGTTGATTTAGGTGACATCTCTGGCATTAATGCTTCAGTTGTAAACATTCAAAAAGAAATTGA
CCGCCTCAATGAGGTTGCCAAGAATTTAAATGAATCTCTCATCGATCTCCAAGAACTTGGAAAGTAT
GAGCAGTATATAAAATGGCCATGGTACATTTGGCTAGGTTTTATAGCTGGCTTGATTGCCATAGTAA
TGGTGACAATTATGCTTTGCTGTATGACCAGTTGCTGTAGTTGTCTCAAGGGCTGTTGTTCTTGTGG
ATCCTGCTGCAAATTTGATGAAGACGACTCTGAGCCAGTGCTCAAAGGAGTCAAATTACATTACACA
TAA

### RSV F Protein and Portions Thereof for Use in a Chimeric Protein

[0129] In certain embodiments, the chimeric protein comprises an RSV cytoplasmic tail (CT) domain or a portion thereof. The location and structure of the RSV cytoplasmic tail (CT) domain of the F protein is known in the art (see, e.g., Baviskar et al. (2013) J Virol 87(19): 10730-10741). In certain embodiments, and as commonly used in the art, the term RSV cytoplasmic tail (CT) domain of the F protein refers to the sequence KARSTPVTLSKDQLSGINNIAFSN (SEQ ID NO: 25) or KARSTPITLSKDQLSGINNIAFSN (SEQ ID NO: 26) (see, e.g., FIG. 2).

[0130] In certain embodiments, a portion of an RSV F protein cytoplasmic tail (CT) refers to a fragment of an RSV F protein CT comprising at least about 15 amino acids, at least about 20 amino acids, at least about 21 amino acids, at least about 22 amino acids, or at least about 23 amino acids of SEQ ID NO: 25 or 26 or a sequence comprising at least about 80%, at least about 85%, at least about 90%, at least about 95%, at least about 96%, at least about 97%, at least about 98%, or at least about 99% sequence identity to SEQ ID NO: 25 or 26. In certain embodiments, the RSV CT domain is truncated at the N- and/or C-terminus by about 1-15 amino acids, by about 1-10 amino acids, by about 1-5 amino acids, by about 1-3 amino acids, by about 5-15 amino acids, or by about 5-10 amino acids, for example, by about 1, about 2, about 3, about 4, about 5 about 6, about 7, about 8, about 9, or about 10 amino acids.

[0131] In certain embodiments, the chimeric protein comprises an RSV F protein cytoplasmic tail (CT) domain and an RSV transmembrane (TM) domain or a portion thereof. The location and structure of the RSV transmembrane domain (TM) is known in the art (see, e.g., Collins et al. (1984) PNAS 81:7683-7687 at FIG. 3) and can include the sequence IMITTIIIVIIVILLSLIAVGLLLYC (SEQ ID NO: 27) or IMIITAIIIVIIVVLLSLIAIGLLLYC (SEQ ID NO: 28). In certain embodiments, the chimeric protein comprises a portion of the RSV transmembrane (TM) domain (e.g., a fragment of an RSV transmembrane (TM) domain comprising at least about 15 amino acids, at least about 20 amino acids, at least about 21 amino acids, at least about 22 amino acids, at least about 23 amino acids, at least about 24 amino acids or at least about 25 amino acids of SEQ ID NO: 27 or 28, or a sequence comprising at least about 80%, at least about 85%, at least about 90%, at least about 95%, at least about 96%, at least about 97%, at least about 98%, or at least about 99% sequence identity to SEQ ID NO: 27 or 28). In certain embodiments, the RSV TM domain is truncated at the N- and/or C-terminus of SEQ ID NO: 27 or 28 by about 1-15 amino acids, by about 1-10 amino acids, by about 1-5 amino acids, by about 1-3 amino acids, by about 5-15 amino acids, or by about 5-10 amino acids, for example, by about 1, about 2, about 3, about 4, about 5 about 6, about 7, about 8, about 9, or about 10 amino acids.

[0132] In certain embodiments, the chimeric protein comprises at least a portion of an RSV F protein sequence that is N-terminal to the transmembrane (TM) domain of the RSV F protein, for example, GKSTTN (SEQ ID NO: 29). Accordingly, in certain embodiments, the chimeric protein comprises at least a portion of an RSV F protein sequence selected from GKSTTNIMITTIIIVIIVILLSLIAVGLLLYCKARSTPVTLSKDQLSGINNIAFSN (SEQ ID NO: 30) and GKSTTNIMITAIIIVIIVVLLSLIAIGLLLYCKARSTPITLSKDQLSGINNIAFSN (SEQ ID NO: 31) or a portion of either of the foregoing. For example, a portion of an RSV F protein sequence can include the sequence GLLLYCKARSTPVTLSKDQLSGINNIAFSN (SEQ ID NO: 32), YCKARSTPVTLSKDQLSGINNIAFSN (SEQ ID NO: 33), CKARSTPVTLSKDQLSGINNIAFSN (SEQ ID NO: 34), KARSTPVTLSKDQLSGINNIAFSN (SEQ ID NO: 35), ARSTPVTLSKDQLSGINNIAFSN (SEQ ID NO: 36), GLLLYCKARSTPITLSKDQLSGINNIAFSN (SEQ ID NO: 37), YCKARSTPITLSKDQLSGINNIAFSN (SEQ ID NO: 38), CKARSTPITLSKDQLSGINNIAFSN (SEQ ID NO: 39), KARSTPITLSKDQLSGINNIAFSN (SEQ ID NO: 40), ARSTPITLSKDQLSGINNIAFSN (SEQ ID NO: 41), or a portion of any of the foregoing (e.g., a fragment of any of the foregoing comprising at least about 15 amino acids, at least about 20 amino acids, at least about 21 amino acids, at least about 22 amino acids, at least about 23 amino acids, at least about 24 amino acids, at least about 25 amino acids, at least about 26 amino acids, at least about 27 amino acids, at least about 28 amino acids, or at least about 29 amino acids or a sequence comprising at least about 80%, at least about 85%, at least about 90%, at least about 95%, at least about 96%, at least about 97%, at least about 98%, or at least about 99% sequence identity thereto). In certain embodiments, the RSV CT domain is truncated at the N- or C-terminus by about 1-15 amino acids, by about 1-10 amino acids, by about 1-5 amino acids, by about 1-3 amino acids, by about 5-15 amino acids, or by about 5-10 amino acids, for example, by about 1, about 2, about 3, about 4, about 5 about 6, about 7, about 8, about 9, or about 10 amino acids.

[0133] In certain embodiments, the portion of the F protein used in the chimeric coronavirus S protein-RSV F protein is from the A2 RSV strain. In certain embodiments, the more thermally stable F protein from the RSV line 19 strain is used. Without wishing to be bound by theory, use of the F protein from the RSV line 19 may be advantageous because highly potent RSV neutralizing antibodies have been induced against the pre-F conformation of the F protein, and the line 19 F protein maintains relatively high levels of pre-F on the surface of virions.

### Chimeric Coronavirus S-RSV F Proteins

[0134] In certain embodiments, the disclosure provides a chimeric coronavirus-RSV protein, comprising an N-terminal portion of a coronavirus S protein and a C-terminal portion of an RSV F protein. In certain embodiments, the N-terminal portion of the chimeric coronavirus-RSV protein comprises at least about 200 amino acids, at least about 300 amino acids, at least about 400 amino acids, at least about 500 amino acids, at least about 600 amino acids, at least about 700 amino acids, at least about 800 amino acids, at least about 900 amino acids, at least about 1000 amino acids, at least about 1100 amino acids, at least about 1200 amino acids, at least about 1210 amino acids, at least about 1220 amino acids, at least about 1230 amino acids, at least about 1240 amino acids, at least about 1250 amino acids, at least about 1260 amino acids, or at least about 1270 amino acids of a coronavirus spike protein as described herein, or a variant thereof (e.g., a coronavirus spike protein comprising at least about 80%, at least about 85%, at least about 90%, at least about 95%, at least about 96%, at least about 97%, at least about 98%, or at least about 99% sequence identity to a coronavirus spike protein described herein). In certain embodiments, N-terminal portion of the spike protein is truncated by about 1-100 amino acids, by about 1-90 amino acids, by about 1-80 amino acids, by about 1-70 amino acids, by about 1-60 amino acids, or by about 1-50 amino acids, for example, by about 1, about 2, about 3, about 4, about 5 about 6, about 7, about 8, about 9, or about 10 amino acids. In certain embodiments, the C-terminal portion of the chimeric coronavirus-RSV protein comprises from about 10 to about 100 amino acids of the C-terminal portion of an RSV F protein, from about 20 to about 50 amino acids of the C-terminal portion of an RSV F protein, from about 25 to about 50 amino acids of the C-terminal portion, from about 20 to about 40 amino acids of the C-terminal portion of an RSV F protein, from about 25 to about 40 amino acids of the C-terminal portion, from about 20 to about 30 amino acids of the C-terminal portion of an RSV F protein, from about 25 to about 30 amino acids of the C-terminal portion, or about 24 amino acids of the C-terminal portion of an RSV F protein.

[0135] In certain embodiments, the portions of the coronavirus (e.g., SARS-CoV-2) and RSV sequences used in the chimeric coronavirus-RSV protein comprise about 70% or more, about 75% or more, about 80% or more, about 85% or more, about 90% or more, about 95% or more, about 96% or more, about 97% or more, about 98% or more, or about 99% or more sequence identity to a corresponding portion of a wild-type protein.

[0136] In certain embodiments, the chimeric coronavirus-RSV protein comprises a sequence selected from the group consisting of SEQ ID NOs: 1-6, 62, 68, 74, 80, 86, 92, 98, and 110, or a protein comprising about 80% or more, about 85% or more, about 90% or more, about 95% or more, about 96% or more, about 97% or more, about 98% or more, or about 99% or more sequence identity to a protein selected from the group consisting of SEQ ID NOs:1-6, 62, 68, 74, 80, 86, 92, 98, and 110.

[0137] In certain embodiments, the chimeric coronavirus-RSV protein is encoded by a nucleic acid sequence comprising a sequence selected from the group consisting of SEQ ID NOs: 7-12, 63, 69, 75, 81, 87, 93, 99, and 111, or a nucleic acid sequence comprising about 80% or more, about 85% or more, about 90% or more, about 95% or more, about 96% or more, about 97% or more, about 98% or more, or about 99% or more sequence identity to a nucleic acid selected from the group consisting of SEQ ID NOs: 7-12, 63, 69, 75, 81, 87, 93, 99, and 111, or an RNA counterpart of any of the foregoing, or a complementary sequence of any of the foregoing.

### Chimeric RSV

[0138] Common vectors for storing RSV include plasmids and bacterial artificial chromosomes (BAC). Typically, a bacterial artificial chromosome comprises one or more genes selected from the group consisting of oriS, repE, parA, and parB genes of Factor F in operable combination with a selectable marker, e.g., a gene that provides resistance to an antibiotic. The nucleic acid sequence may be the genomic or antigenomic sequence of the virus that is optionally mutated, e.g., an RSV strain that is optionally mutated.

[0139] Cultivating RSV in E. coli bacteria may be accomplished by utilizing a bacterial artificial chromosome (BAC). A BAC vector for storing and genetically engineering RSV is reported in Stobart et al., Methods Mol Biol., 2016, 1442:141-53 and U.S. Patent Application Publication number 2012/0264217. The disclosed BAC contains the complete antigenomic sequence of respiratory syncytial virus (RSV) strain A2 except the F gene, which is the antigenomic sequence of RSV strain line 19.

[0140] Accordingly, the chimeric proteins (e.g., chimeric coronavirus-RSV proteins) disclosed herein can be stored and cultivated using a BAC, e.g., the BAC reported in Stobart et al. (2016), supra, wherein the F gene and optionally the G gene are replaced with a nucleotide sequence encoding the chimeric protein.

[0141] Along with helper plasmids, the plasmid or BAC comprising a chimeric RSV can be used in the reverse genetics system for the recovery of infectious virus. The antigenome sequence on the plasmid can be mutated prior to virus recovery to generate viruses with desired mutations.

[0142] In certain embodiments, the disclosure relates to methods of generating chimeric RSV particles (e.g., chimeric coronavirus-RSV particles) comprising inserting a vector with a BAC gene and a chimeric RSV antigenome (e.g., a coronavirus-RSV antigenome) into an isolated eukaryotic cell and inserting one or more vectors (e.g., helper plasmids) selected from the group consisting of: a vector encoding an N protein (e.g., NS1 or NS2) of RSV, a vector encoding a P protein of RSV, a vector encoding an L protein of RSV, and a vector encoding an M2-1 protein of RSV into the cell under conditions such that RSV virion is formed. In certain embodiments, the vector encoding the N protein, the P protein, the L protein, or the MS-1 protein is codon-deoptimized. Inserting a vector into a cell may occur by physically injecting, electroporating, or mixing the cell and the vector under conditions such that the vector enters the cell.

[0143] Chimeric RSV (e.g., chimeric coronavirus-RSV) is contemplated to include certain mutations, deletions, or variant combinations, such as cold-passaged (cp) non-temperature sensitive (ts) derivatives of RSV, cpRSV, such as rA2cp248/404/1030ΔSH. rA2cp248/404ΔSH contains 4 independent attenuating genetic elements: cp which is based on missense mutations in the N and L proteins that together confer the non-ts attenuation phenotype of cpRSV; ts248, a missense mutation in the L protein; ts404, a nucleotide substitution in the gene-start transcription signal of the M2 gene; and ΔSH, complete deletion of the SH gene. rA2cp248/404/1030ΔSH contains independent attenuating genetic elements: those present in rA2cp248/404ΔSH and ts1030, another missense mutation in the L protein. See Karron et al., (2005) J Infect Dis. 191(7): 1093-1104, hereby incorporated by reference.

[0144] Within certain embodiments, it is contemplated that the chimeric RSV antigenome (e.g., coronavirus-RSV antigenome) may contain deletions or mutations in nonessential genes (e.g., the G, SH, NS1, NS2, and M2-2 genes) or combinations thereof. For example, in certain embodiments, the gene SH is not present. In certain embodiments, the intergenic region between the SH gene and the G gene is not present. In certain embodiments, the gene G is not present. Without wishing to be bound by theory, it is believed that exclusion of the SH gene and intergenic region between the SH gene and the G gene may increase the transcription of the chimeric RSV F protein (e.g., chimeric coronavirus S protein/RSV F protein and to attenuate the virus in vivo.

[0145] In certain embodiments, the RSV G gene comprises a Met to Ile mutation at amino acid 48 to ablate the secreted form of the G protein. Without wishing to be bound by theory, it is believed that the secreted form of the G protein acts as an antigen decoy and is not essential for in vitro replication, so ablation of the secreted form of the G protein may be advantageous.

[0146] Due to the redundancy of the genetic code, individual amino acids are encoded by multiple sequences of codons, sometimes referred to as synonymous codons. In different species, synonymous codons are used more or less frequently, sometimes referred to as codon bias. Genetic engineering of under-represented synonymous codons into the coding sequence of a gene has been shown to result in decreased rates of protein translation without a change in the amino acid sequence of the protein. Mueller et al. report virus attenuation by changes in codon bias. See, Science, 2008, 320:1784. See also WO/2008121992, WO/2006042156, Burns et al. (2006) J Virology 80(7):3259 and Mueller et al. (2006) J Virology 80(19):9687.

[0147] Usage of codon deoptimization in RSV is reported in Meng, et al., MBio 5, e01704-01714 (2014) and U.S. Patent Application Publication number 2016/0030549. In certain embodiments, this disclosure relates to isolated nucleic acids, recombinant coronavirus-RSV with codon deoptimization, vaccines produced therefrom, and vaccination methods related thereto. In certain embodiments, the codon deoptimization includes using codons that are used less frequently in humans. In certain embodiments, the codon deoptimization is in the nonstructural genes NS1 and NS2 and optionally in a gene L.

[0148] In certain embodiments, the codon deoptimization is in the nucleic acid encoding a chimeric coronavirus-RSV protein sequence selected from the group consisting of SEQ ID NOs: 1-6, 62, 68, 74, 80, 86, 92, 98, and 110 or variants thereof.

[0149] In certain embodiments, the disclosure relates to isolated nucleic acids comprising deoptimized RSV genes (e.g., NS1 and/or NS2, and optionally the gene L) of a wild-type human RSV or variants thereof wherein the nucleotides are substituted such that a codon to produce Gly is GGT, a codon to produce Asp is GAT, a codon to produce Glu is GAA, a codon to produce His is CAT, a codon to produce Ile is ATA, a codon to produce Lys is AAA, a codon to produce Leu is CTA, a codon to produce Asn is AAT, a codon to produce Gln is CAA, a codon to produce Val is GTA, or a codon to produce Tyr is TAT, or combinations thereof. In certain embodiments, a gene in the isolated nucleic acid further comprises a combination of at least two, three, four, five, six, seven, eight nine, ten, or all of the individual codons. In certain embodiment, a gene in the isolated nucleic acid comprises at least 20, 30, 40, or 50 or more of the codons.

[0150] In certain embodiments, the disclosure relates to isolated nucleic acids comprising deoptimized RSV genes (e.g., NS1 and/or NS2 optionally the gene L) of a wild-type human RSV or variants thereof wherein the nucleotides are substituted such that a codon to produce Ala is GCG, a codon to produce Cys is TGT, a codon to produce Phe is TTT, a codon to produce Pro is CCG, a codon to produce Arg is CGT, a codon to produce Ser is TCG, or a codon to produce Thr is ACG, or combinations thereof. In certain embodiments, a gene containing the nucleic acid comprises a combination of at least two, three, four, five, six, seven, eight nine, ten, eleven, twelve, thirteen, fourteen, fifteen, sixteen, or all of the individual codons. In certain embodiments, a gene in the isolated nucleic acid further comprises at least 20, 30, 40, or 50 or more of the codons.

[0151] In certain embodiments, the codon-deoptimized NS1 gene comprises the sequence:

(SEQ ID NO: 44)
ATGGGTTCGAATTCGCTATCGATGATAAAAGTACGTCTACAAAATCTATTTGATAATGATGAAGTAG
CGCTACTAAAAATAACGTGTTATACGGATAAACTAATACATCTAACGAATGCGCTAGCGAAAGCGGT
AATACATACGATAAAACTAAATGGTATAGTATTTGTACATGTAATAACGTCGTCGGATATATGTCCG
AATAATAATATAGTAGTAAAATCGAATTTTACGACGATGCCGGTACTACAAAATGGTGGTTATATAT
GGGAAATGATGGAACTAACGCATTGTTCGCAACCGAATGGTCTACTAGATGATAATTGTGAAATAAA
ATTTTCGAAAAAACTATCGGATTCGACGATGACGAATTATATGAATCAACTATCGGAACTACTAGGT
TTTGATCTAAATCCGTAA.

[0152] In certain embodiments, the codon-deoptimized NS2 gene comprises the sequence:

(SEQ ID NO: 45)
ATGGATACGACGCATAATGATAATACGCCGCAACGTCTAATGATAACGGATATGCGTCCGCTATCGC
TAGAAACGATAATAACGTCGCTAACGCGTGATATAATAACGCATAAATTTATATATCTAATAAATCA
TGAATGTATAGTACGTAAACTAGATGAACGTCAAGCGACGTTTACGTTTCTAGTAAATTATGAAATG
AAACTACTACATAAAGTAGGTTCGACGAAATATAAAAAATATACGGAATATAATACGAAATATGGTA
CGTTTCCGATGCCGATATTTATAAATCATGATGGTTTTCTAGAATGTATAGGTATAAAACCGACGAA
ACATACGCCGATAATATATAAATATGATCTAAATCCGTAA.

[0153] Without wishing to be bound by theory, codon-deoptimization of NS1 and NS2 may be advantageous because the NS1 and NS2 proteins are known to interfere with host interferon response to infection and are non-essential for in vitro replication.

[0154] In certain embodiments, the disclosure relates to isolated nucleic acids encoding deoptimized genes for a chimeric non-RSV/RSV F protein, e.g., a chimeric coronavirus S protein and RSV F protein. A chimeric coronavirus S protein and RSV F protein can have a sequence selected from the group consisting of SEQ ID NOs: 1-6, 62, 68, 74, 80, 86, 92, 98, and 110 or variants thereof or variants thereof, wherein the nucleotides are substituted such that a codon to produce Gly is GGT, a codon to produce Asp is GAT, a codon to produce Glu is GAA, a codon to produce His is CAT, a codon to produce Ile is ATA, a codon to produce Lys is AAA, a codon to produce Leu is CTA, a codon to produce Asn is AAT, a codon to produce Gln is CAA, a codon to produce Val is GTA, or a codon to produce Tyr is TAT, or combinations thereof. In certain embodiments, a gene in the isolated nucleic acid further comprises a combination of at least two, three, four, five, six, seven, eight nine, ten, or all of the individual codons. In certain embodiment, a gene in the isolated nucleic acid comprises at least 20, 30, 40, or 50 or more of the codons.

[0155] Glenn et al. report a randomized, blinded, controlled, dose-ranging study of a respiratory syncytial virus recombinant fusion (F) nanoparticle vaccine in healthy women of childbearing age ((2016) J Infect Dis. 213(3):411-22). In certain embodiments, the disclosure relates to virus particles and virus-like particles (VLPs) that contain a chimeric protein comprising a portion of a non-RSV fusion protein (e.g., a coronavirus S protein) and a portion of an RSV F protein, e.g., a chimeric coronavirus S protein and RSV F protein comprising a sequence selected from the group consisting of SEQ ID NOs: 1-6, 62, 68, 74, 80, 86, 92, 98, and 110 or variants thereof, and one or more RSV core structural proteins as described herein sufficient to form a VLP. Virus particles are commonly used as an inactivated vaccine (or killed vaccine). RSV can be grown in culture and then killed using a method such as heat or formaldehyde. Live attenuated vaccines are typically weakened such that rate of replication and/or infection is slower.

[0156] In certain embodiments, the disclosure contemplates a chimeric RSV particle (e.g., a chimeric coronavirus-RSV particle) as a whole virus vaccine, e.g., the entire virus particle exposed to heat, chemicals, or radiation such that the genome of the chimeric RSV is non-replicative or non-infectious. In certain embodiments, the disclosure contemplates a chimeric RSV particle (e.g., a chimeric coronavirus-RSV particle) in a split virus vaccine produced by using a detergent to disrupt the virus and by purifying out the chimeric proteins disclosed herein as antigens to stimulate the immune system to mount a response to the virus.

In certain embodiments, the disclosure relates to a live attenuated chimeric RSV-SARS-CoV-2 antigenome comprising a sequence selected from the group consisting of SEQ ID NOs: 13-18, 65, 71, 77, 83, 89, 95, 101, 104-109, and 113 or a variant thereof having at least about 85% (e.g., at least about 90%, at least about 95%, at least about 96%, at least about 97%, at least about 98%, or at least about 99%) sequence identity to a sequence selected from the group consisting of SEQ ID NOs: 13-18, 65, 71, 77, 83, 89, 95, 101, 104-109, and 113, or an RNA counterpart of any of the foregoing, or a complementary sequence of any of the foregoing.

[0157] VLPs closely resemble mature virions, but they do not contain viral genomic material (i.e., viral genomic RNA). Therefore, VLPs are non-replicative in nature. In addition, VLPs can express proteins on the surface of the VLP. Moreover, since VLPs resemble intact virions and are multivalent particulate structures, VLPs can be effective in inducing neutralizing antibodies to the surface protein. VLPs can be administered repeatedly.

[0158] In certain embodiments, the disclosure contemplates VLP comprising a chimeric RSV F protein (e.g., a chimeric coronavirus S protein-RSV F protein) disclosed herein on the surface and an influenza virus matrix (M1) protein core. Quan et al. report methods of producing virus-like particles (VLPs) made-up of an influenza virus matrix (M1) protein core and RSV-F on the surface. (2011) J Infect Dis. 204(7): 987-995. One can generate recombinant baculovirus (rBVs) expressing RSV F and influenza M1 and transfect them into insect cells for production.

### METHODS OF USE

[0159] In certain embodiments, the disclosure relates to immunogenic compositions comprising an immunologically effective amount of a chimeric RSV (e.g., a chimeric coronavirus-RSV), RSV and/or non-RSV (e.g., coronavirus) polypeptide, chimeric RSV (e.g., chimeric coronavirus-RSV) particle, chimeric RSV virus-like particle (e.g., a chimeric coronavirus/RSV VLP, and/or a nucleic acid disclosed herein. In certain embodiments, the disclosure relates to methods for stimulating the immune system of an individual to produce a protective immune response against a non-RSV virus (e.g., a coronavirus such as SARS-CoV-2). In certain embodiments, an immunologically effective amount of a chimeric RSV (e.g., a chimeric coronavirus-RSV), polypeptide, and/or nucleic acid disclosed herein is administered to the individual in a physiologically acceptable carrier.

[0160] In certain embodiments, the disclosure relates to medicaments and vaccine products comprising nucleic acids disclosed herein for uses disclosed herein.

[0161] In certain embodiments, the disclosure relates to the use of nucleic acids or vectors disclosed herein for the manufacture of a medicament and vaccine products for uses disclosed herein.

[0162] The disclosure also provides the ability to analyze other types of attenuating mutations and to incorporate them into chimeric RSV (e.g., chimeric coronavirus-RSV) for vaccine or other uses. For example, a tissue culture-adapted nonpathogenic strain of pneumonia virus of mice (the murine counterpart of RSV) lacks a cytoplasmic tail of the G protein (Randhawa et al., (1995) Virology 207: 240-245). By analogy, the cytoplasmic and transmembrane domains of each of the glycoproteins, HN, G and SH, can be deleted or modified to achieve attenuation.

[0163] Other mutations for use in infectious chimeric RSV (e.g., chimeric coronavirus/RSV) of the present disclosure include mutations in cis-acting signals identified during mutational analysis of chimeric RSV minigenomes (e.g., coronavirus-RSV minigenomes). For example, insertional and deletional analysis of the leader and trailer and flanking sequences identified viral promoters and transcription signals and provided a series of mutations associated with varying degrees of reduction of RNA replication or transcription. Saturation mutagenesis (whereby each position in turn is modified to each of the nucleotide alternatives) of these cis-acting signals also has identified many mutations which reduced (or in one case increased) RNA replication or transcription. Any of these mutations can be inserted into the complete antigenome or genome as described herein. Other mutations involve replacement of the 3′ end of genome with its counterpart from antigenome, which is associated with changes in RNA replication and transcription. In addition, the intergenic regions (Collins et al., (1986) Proc. Natl. Acad. Sci. USA 83:4594-4598, incorporated herein by reference) can be shortened or lengthened or changed in sequence content, and the naturally-occurring gene overlap (Collins et al. (1987) Proc. Natl. Acad. Sci. USA 84:5134-5138, incorporated herein by reference) can be removed or changed to a different intergenic region by the methods described herein.

[0164] For vaccine use, virus produced according to the present disclosure can be used directly in vaccine formulations, or lyophilized, as desired, using lyophilization protocols well known to the artisan. Lyophilized virus is typically maintained at about 4° C. When ready for use the lyophilized virus is reconstituted in a stabilizing solution, e.g., saline or comprising SPG, Mg, and HEPES, with or without adjuvant.

[0165] Typically, the chimeric RSV vaccines (e.g., coronavirus-RSV vaccines) of the disclosure contain as an active ingredient an immunogenetically effective amount of chimeric virus produced as described herein. The modified virus may be introduced into a subject with a physiologically acceptable carrier and/or adjuvant. Useful carriers are well known in the art, and include, e.g., water, buffered water, 0.4% saline, 0.3% glycine, hyaluronic acid and the like. The resulting aqueous solutions may be packaged for use as is, or lyophilized, the lyophilized preparation being combined with a sterile solution prior to administration, as mentioned above. The compositions may contain pharmaceutically acceptable auxiliary substances as required to approximate physiological conditions, such as pH adjusting and buffering agents, tonicity adjusting agents, wetting agents and the like, for example, sodium acetate, sodium lactate, sodium chloride, potassium chloride, calcium chloride, sorbitan monolaurate, triethanolamine oleate, and the like. Acceptable adjuvants include incomplete Freund's adjuvant, aluminum phosphate, aluminum hydroxide, or alum, which are materials well known in the art.

[0166] In certain embodiments, a chimeric RSV vaccine (e.g., coronavirus-RSV vaccine) can be formulated in a sterile, non-adjuvanted, buffered, aqueous solution filled into polypropylene cryovials. The formulation may comprise Williams E serum-free medium, sucrose, potassium phosphate dibasic, potassium phosphate monobasic, L-glutamic acid and sodium hydroxide for pH adjustment to pH 7.9.

[0167] Upon immunization with a chimeric RSV composition (e.g., coronavirus-RSV composition) as described herein, via aerosol, droplet, oral, topical or other route, the immune system of the subject responds to the vaccine by producing antibodies specific for virus proteins, e.g., S glycoproteins. As a result of the vaccination, the subject becomes at least partially or completely immune to coronavirus infection, or resistant to developing moderate or severe coronavirus infection, particularly of the lower respiratory tract.

[0168] The subject to which the vaccines are administered can be any mammal which is susceptible to infection by a non-RSV (e.g., coronavirus, e.g., SARS-CoV-2) or a closely related virus and which subject is capable of generating a protective immune response to the antigens of the vaccinating strain. Thus, suitable subjects include humans, non-human primates, bovine, equine, swine, ovine, caprine, lagamorph, rodents, etc. Accordingly, the disclosure provides methods for creating vaccines for a variety of human and veterinary uses.

[0169] The vaccine compositions containing the chimeric RSV (e.g., coronavirus-RSV) of the disclosure are administered to a subject susceptible to or otherwise at risk of coronavirus infection to enhance the subject's own immune response capabilities. Such an amount is defined to be an “immunogenically effective dose.” In this use, the precise amounts again depend on the subject's state of health and weight, the mode of administration, the nature of the formulation. The vaccine formulations should provide a quantity of chimeric coronavirus-RSV of the disclosure sufficient to effectively protect the subject patient against serious or life-threatening infection.

[0170] The chimeric RSV (e.g., coronavirus-RSV) produced in accordance with the present disclosure can be combined with viruses of the other subgroup or strains to achieve protection against multiple non-RSV (e.g., coronavirus) subgroups or strains, or protective epitopes of these strains can be engineered into one virus as described herein. Typically, the different viruses are in admixture and administered simultaneously, but may also be administered separately. For example, as the S glycoproteins of the coronavirus subgroups differ in amino acid sequence, this similarity is the basis for a cross-protective immune response as observed in animals immunized with chimeric coronavirus-RSV or S antigen and challenged with a heterologous strain. Thus, immunization with one strain may protect against different strains of the same or different subgroup.

[0171] In some instances, it may be desirable to combine the chimeric RSV vaccines (e.g., chimeric coronavirus-RSV vaccines) of the disclosure with vaccines that induce protective responses to other agents. For example, the chimeric RSV vaccine (e.g., chimeric coronavirus-RSV vaccine) of the present disclosure can be administered simultaneously with an influenza vaccine.

[0172] Single or multiple administrations of the vaccine compositions of the disclosure can be carried out. In certain embodiments, a single dose of the vaccine compositions is sufficient to generate immunity. In certain embodiments, no adjuvant is required. Multiple, sequential administrations may be required to elicit sufficient levels of immunity. Administration may begin within the first month of life, or before, about two months of age, typically not later than six months of age, and at intervals throughout childhood, such as at two months, six months, one year and two years, as necessary to maintain sufficient levels of protection against native (wild-type) infection. Similarly, adults who are particularly susceptible to repeated or serious coronavirus infection, such as, for example, health care workers, day care providers, elder care providers, the elderly (over 55, 60, 65, 70, 75, 80, 85, or 90 years), or individuals with compromised cardiopulmonary function may require multiple immunizations to establish and/or maintain protective immune responses. Levels of induced immunity can be monitored by measuring amounts of neutralizing secretory and serum antibodies, and dosages adjusted or vaccinations repeated as necessary to maintain desired levels of protection. Further, different vaccine viruses may be advantageous for different recipient groups. For example, an engineered strain expressing an additional protein rich in T-cell epitopes may be particularly advantageous for adults rather than for infants.

[0173] Administration is typically by aerosol, nebulizer, or other topical application to the respiratory tract of the patient being treated. Recombinant chimeric RSV (e.g., chimeric coronavirus-RSV) is administered in an amount sufficient to result in the expression of therapeutic or prophylactic levels of the desired gene product. Examples of representative gene products which are administered in this method include those which encode, for example, those particularly suitable for transient expression, e.g., interleukin-2, interleukin-4, gamma-interferon, GM-CSF, G-CSF, erythropoietin, and other cytokines, glucocerebrosidase, phenylalanine hydroxylase, cystic fibrosis transmembrane conductance regulator (CFTR), hypoxanthine-guanine phosphoribosyl transferase, cytotoxins, tumor suppressor genes, antisense RNAs, and vaccine antigens.

[0174] In certain embodiments, the disclosure relates to immunogenic compositions (e.g., vaccines) comprising an immunologically effective amount of a recombinant chimeric RSV (e.g., chimeric coronavirus-RSV) of the disclosure (e.g., an attenuated live recombinant chimeric RSV or inactivated, non-replicating chimeric RSV), an immunologically effective amount of a polypeptide disclosed herein, and/or an immunologically effective amount of a nucleic acid disclosed herein.

[0175] In certain embodiments, the disclosure relates to methods for stimulating the immune system of an individual to produce a protective immune response against coronavirus. In the methods, an immunologically effective amount of a recombinant chimeric RSV (e.g., chimeric coronavirus-RSV) disclosed herein, an immunologically effective amount of a polypeptide disclosed herein, and/or an immunologically effective amount of a nucleic acid disclosed herein is administered to the individual in a physiologically acceptable carrier.

[0176] Typically, the carrier or excipient is a pharmaceutically acceptable carrier or excipient, such as sterile water, aqueous saline solution, aqueous buffered saline solutions, aqueous dextrose solutions, aqueous glycerol solutions, ethanol, or combinations thereof. The preparation of such solutions ensuring sterility, pH, isotonicity, and stability is affected according to protocols established in the art. Generally, a carrier or excipient is selected to minimize allergic and other undesirable effects, and to suit the particular route of administration, e.g., subcutaneous, intramuscular, intranasal, oral, topical, etc. The resulting aqueous solutions can e.g., be packaged for use as is or lyophilized, the lyophilized preparation being combined with a sterile solution prior to administration.

[0177] In certain embodiments, the chimeric RSV (e.g., chimeric coronavirus/RSV) or component thereof (e.g., a chimeric non-RSV/RSV fusion protein such as a chimeric coronavirus S protein-RSV F protein), is administered in a quantity sufficient to stimulate an immune response specific for one or more strains of non-RSV such as coronavirus. In other words, in certain embodiments, an immunologically effective amount of chimeric RSV (e.g., a coronavirus-RSV) or component thereof, e.g., a chimeric non-RSV/RSV fusion protein (e.g., a chimeric coronavirus S protein-RSV F protein) is administered. Preferably, administration of a chimeric RSV (e.g., a chimeric coronavirus/RSV) elicits a protective immune response. Dosages and methods for eliciting a protective anti-viral immune response, adaptable to producing a protective immune response against a non-RSV (e.g., a coronavirus) and/or RSV, are known to those of skill in the art. See, e.g., U.S. Pat. No. 5,922,326; Wright et al. (1982) Infect. Immun. 37:397-400; Kim et al. (1973) Pediatrics 52:56-63; and Wright et al. (1976) J. Pediatr. 88:931-936. For example, virus can be provided in the range of about 10³-10⁷ pfu (plaque forming units) per dose administered (e.g., 10³-10⁷ pfu, 10³-10⁶ pfu, 10³-10⁵ pfu, 10⁴-10⁷ pfu, 10⁴-10⁶ pfu, or 10⁴-10⁶ pfu per dose administered). In certain embodiments, the virus is provided in an amount of about 10³ pfu per dose administered. In certain embodiments, the virus is provided in an amount of about 10⁴ pfu per dose administered. In certain embodiments, the virus is provided in an amount of about 10⁵ pfu per dose administered. In certain embodiments, the virus is provided in an amount of about 10⁶ pfu per dose administered. In certain embodiments, the virus is provided in an amount of about 10⁷ pfu per dose administered. Typically, the dose is adjusted based on, e.g., age, physical condition, body weight, sex, diet, mode and time of administration, and other clinical factors.

[0178] The vaccine formulation can be systemically administered, e.g., by subcutaneous or intramuscular injection using a needle and syringe or a needleless injection device. The vaccine formulation can be administered intratracheally. Preferably, the vaccine formulation is administered intranasally, e.g., by drops, aerosol (e.g., large particle aerosol (greater than about 10 microns)), or spray into the upper respiratory tract. While any of the above routes of delivery results in a protective systemic immune response, intranasal administration confers the added benefit of eliciting mucosal immunity at the site of entry of the virus (i.e., may generate both mucosal and humoral immune responses). While humoral immunity (circulating antibodies) are important for preventing serious lung disease, mucosal antibodies are important for blocking infection and transmission of respiratory viruses. For intranasal administration, attenuated live virus vaccines are often preferred, e.g., an attenuated, cold adapted and/or temperature sensitive recombinant virus. Further, unlike many candidate SARS-CoV-2 vaccines in pre-clinical and clinical development, in certain embodiments, a single intranasal inoculation of a live, attenuated, replicating chimeric coronavirus/RSV vaccine as described herein can be sufficient to generate immunity. Additionally, additionally in certain embodiments, no adjuvant is present, avoiding the need for an additional formulation component and the need to evaluate adjuvant activity in clinical studies.

[0179] As an alternative or in addition to attenuated live virus vaccines, killed virus vaccines, nucleic acid vaccines, and/or polypeptide subunit vaccines, for example, can be used, as suggested by Walsh et al (1987) J. Infect. Dis. 155:1198-1204 and Murphy et al (1990) Vaccine 8:497-502.

[0180] In certain embodiments, the attenuated recombinant chimeric coronavirus-RSV is as used in a vaccine and is sufficiently attenuated such that symptoms of infection, or at least symptoms of serious infection, does not occur in most individuals immunized (or otherwise infected) with the attenuated virus—in embodiments in which viral components (e.g., the nucleic acids or polypeptides herein) are used as vaccine or immunogenic components. However, virulence is typically sufficiently abrogated such that mild or severe lower respiratory tract infections do not typically occur in the vaccinated or incidental subject.

[0181] While stimulation of a protective immune response with a single dose is preferred, additional dosages can be administered, by the same or different route, to achieve the desired prophylactic effect. In neonates and infants, for example, multiple administrations may be required to elicit sufficient levels of immunity. Administration can continue at intervals throughout childhood, as necessary to maintain sufficient levels of protection against wild-type coronavirus infection. Similarly, adults who are particularly susceptible to repeated or serious coronavirus infection, such as, for example, health care workers, day care providers, elder care providers, the elderly (over 55, 60, 65, 70, 75, 80, 85, or 90 years), and individuals with compromised cardiopulmonary function may require multiple immunizations to establish and/or maintain protective immune responses. Levels of induced immunity can be monitored, for example, by measuring amounts of virus-neutralizing secretory and serum antibodies, and dosages adjusted or vaccinations repeated as necessary to elicit and maintain desired levels of protection.

[0182] Alternatively, an immune response can be stimulated by ex vivo or in vivo targeting of dendritic cells with virus. For example, proliferating dendritic cells are exposed to viruses in a sufficient amount and for a sufficient period of time to permit capture of the coronavirus antigens by the dendritic cells. The cells are then transferred into a subject to be vaccinated by standard intravenous transplantation methods.

[0183] Optionally, the formulation for administration of the vaccine also contains one or more adjuvants for enhancing the immune response to the coronavirus antigens. Contemplated adjuvants include aluminum salts such as Alhydrogel® and Adjuphos®. Contemplated adjuvants include oil-in-water emulsions, where the oil acts as the solute in the water phase and forms isolated droplets, stabilized by emulsifying agents. In certain embodiments, emulsions contain a squalene or α-tocopherol (vitamin E) with additional emulsifying agents such as sorbitan trioleate and polysorbate-80 (PS80) as surfactants. In certain embodiments, emulsions contain a glucopyranosyl lipid A (GLA). GLA can be formulated with chimeric coronavirus-RSV, particles or chimeric coronavirus S protein-RSV F protein either alone or in a squalene-based oil-in-water stable emulsion (SE). Iyer et al. report oil-in-water adjuvants of different particle size using RSV F protein ((2015) Hum Vaccin Immunother 11(7): 1853-1864).

[0184] Suitable adjuvants include, for example: complete Freund's adjuvant, incomplete Freund's adjuvant, saponin, mineral gels such as aluminum hydroxide, surface-active substances such as lysolecithin, pluronic polyols, polyanions, peptides, oil or hydrocarbon emulsions, bacille Calmette-Guerin (BCG), Corynebacterium parvum, and the synthetic adjuvant QS-21.

[0185] If desired, prophylactic vaccine administration of chimeric coronavirus-RSV can be performed in conjunction with administration of one or more immunostimulatory molecules. Immunostimulatory molecules include various cytokines, lymphokines and chemokines with immunostimulatory, immunopotentiating, and pro-inflammatory activities, such as interleukins (e.g., IL-1, IL-2, IL-3, IL-4, IL-12, IL-13); growth factors (e.g., granulocyte-macrophage (GM)-colony stimulating factor (CSF)); and other immunostimulatory molecules, such as macrophage inflammatory factor, Flt3 ligand, B7.1; B7.2, etc. The immunostimulatory molecules can be administered in the same formulation as the chimeric coronavirus-RSV or can be administered separately. Either the protein or an expression vector encoding the protein can be administered to produce an immunostimulatory effect.

[0186] Although vaccination of an individual with an chimeric coronavirus-RSV of a particular strain of a particular subgroup can induce cross-protection against viruses of different strains and/or subgroups, cross-protection can be enhanced, if desired, by vaccinating the individual with attenuated coronavirus from at least two strains, e.g., each of which represents a different subgroup. Similarly, the chimeric coronavirus-RSV vaccines can optionally be combined with vaccines that induce protective immune responses against other infectious agents.

[0187] A potential challenge for a coronavirus live attenuated vaccine is recombination (genetic instability). Natural genomic recombination is a common feature of coronaviruses and other positive-sense viruses in the Nidovirales order. In contrast, natural recombination is rare for viruses like RSV and measles virus (wild-type or vaccine strains) of the negative-sense Mononegavirales order. Furthermore, live attenuated RSV vaccines have been shown to be genetically stable (Stobart (2016), supra), likely owing to the fact that attenuating mutations are either via extensive codon deoptimization or deletion of viral genes. Accordingly, in certain embodiments, a chimeric coronavirus-RSV as described herein exhibits little to no genetic instability.

[0188] In addition, SARS coronaviruses and RSV have in common the potential risk of vaccine-associated enhanced respiratory disease (VAERD) which is associated with certain types of vaccines, for example, non-replicating (e.g. subunit) vaccine types. However, live attenuated coronavirus vaccines have not demonstrated VAERD in contrast to other vaccine technologies such fixed whole virus, subunit, and some vector vaccines. Accordingly, in certain embodiments, a chimeric coronavirus-RSV as described herein does not increase the risk of VAERD. VAERD can be measured in preclinical animal models by assessing markers of inflammation that include excessive pulmonary immune cell infiltrates, elevated Th2 inflammatory cytokine levels, and lung damage by histopathology.

[0189] In certain embodiments, a chimeric RSV (e.g., chimeric coronavirus-RSV) as described herein exhibits (1) high levels of virus-neutralizing antibodies relative to binding, non-neutralizing antibodies, and (2) T cell responses having canonical Th1 antiviral cytokines and/or do not exhibit an imbalance towards high levels of Th2 cytokines.

### EXAMPLES

[0190] The following examples are merely illustrative and are not intended to limit the scope or content of the invention in any way.

### Example 1—Construction of Chimeric Coronavirus Spike Protein—RSV Fusion Protein

[0191] A series of live attenuated vaccine candidates (attRSV-CoV-2, MV-014 series) was constructed by cloning the SARS-CoV2 spike protein (strain USA-WA1/2020) in place of the RSV G and F proteins in an attenuated RSV vector derived from MV-012-968 (FIG. 1). The RSV backbone contains the gene for the mKate2 fluorescent protein and is called DB1 Quad mKate. (See (Rostad et al., (2018) Journal of Virology 92 (6) e01568-17).)

[0192] The cytoplasmic tail of RSV F is required for RSV infectious progeny assembly (Baviskar et al. (2013) Journal of Virology 87(19), 10730-10741). Therefore, it was hypothesized that replacing F with a full length S gene would result in a non-viable virus. Accordingly, as depicted in FIG. 1, a chimeric Spike gene was created wherein the cytoplasmic tail of Spike was replaced with the cytoplasmic tail of RSV F (blue CT portion of the green S gene). The cytoplasmic tail of SARS-CoV-1 was not required for infectivity of Spike-pseudotyped virus (Broer et al. (2006) Journal of Virology 80(3), 1302-1310). However, the transmembrane and juxtamembrane regions of SARS-1 Spike are essential for assembly and entry, though the mechanisms are not fully defined (Corver et al. (2009) Virology Journal 6(1), 230; Godeke et al. (2000) Journal of Virology 74(3), 1566-1571). The amino acid sequence of the transmembrane domain of Spike fused to the cytoplasmic tail of RSV F (underlined text) is depicted at the bottom of FIG. 1.

[0193] Six constructs were designed that contained different C-terminal sequences of RSV F fused with the SARS-CoV2 spike protein ectodomain, and 1 wild-type spike construct was designed (see FIG. 2 and appendix for full sequences).

[0194] The chimeric spike-F genes were designed to contain flanking AatII and SalI sites for cloning into the BAC DB1 Quad mKate backbone (see schematic in FIG. 3 and sequence of BAC DB1 Quad mKate is SEQ ID NO: 46), replacing the DNA fragment encompassing the genes for RSV G and F proteins (nt 5,111 to nt 8015).

[0195] Inserts 210 (SEQ ID NO: 47), 220 (SEQ ID NO: 50), 230 (SEQ ID NO: 51), 240 and (SEQ ID NO: 52), and 300 (SEQ ID NO: 53) were synthesized by Genscript and inserts 211 (SEQ ID NO: 48) and 212 (SEQ ID NO: 49) were synthesized by Twist Bioscience and received as a lyophilized pellet.

[0196] The spike-F inserts and the DB1 Quad mKate vector were digested with the enzymes AatII and Sal I. The DNA corresponding to the digested spike-F inserts (˜4 kb) and DB1Quad mKate without G and F (˜20 kb) was purified from a gel and ligated using T4 DNA ligase. The product of the ligation was used to transform One-shot Stabl3 chemically competent cells (Thermo C737303). The transformants were analyzed by sequencing of the BAC DNA. The antigenomes cloned in BAC were sequenced by Genewiz using 74 primers that provided a coverage of ˜2 (on average) for the entire constructs.

[0197] Sequences of the BACs encoding the RSV-coronavirus genome vaccine candidates (with mKate2 marker) are provided in SEQ ID NOs: 54-59 (inserts 210, 211, 212, 220, 230, and 240, respectively). The sequence of the BAC encoding the RSV-coronavirus genome with wild-type coronavirus spike protein (insert 300) is at SEQ ID NO: 60. The antigenome sequences for the mKate-containing viruses contained within the BAC constructs is provided at SEQ ID NOs: 104-109 (inserts 210, 211, 212, 220, 230, and 240, respectively).

[0198] Versions of these constructs without the label protein mKate2 were constructed using restriction cloning. Specifically, the fragment of the BAC containing the gene for mKate2 was released via digestion with the enzymes KpnI (that cuts in the BAC) and AatII (that cuts inside the antigenome). DB1 Quad without mKate2 is digested with the same enzymes and the fragment without mKate2 is used to replace the fragment with mKate2 in the MV-014 constructs. Sequences of the BACs comprising the RSV-coronavirus genome vaccine candidates (without mKate2 marker) are provided in SEQ ID NOs: 131-136 (inserts 210, 211, 212, 220, 230, and 240, respectively).

[0199] MV-014 constructs without mKate2 and with inserts 210, 211, 212, 220, 230, and 240 are provided in SEQ ID NOs: 13-18, respectively, which are the antigenome sequences for the vaccine candidates.

[0200] BACs for all clones were prepared using Macherey Nagel NucleoBond Xtra BAC or Zymo Research ZymoPureII MaxiPrep kits from 500 ml overnight cultures. The obtained BAC DNA (with or without the mKate marker) was further used for virus rescue in tissue culture, as described in Example 2.

### Example 2—Viral Rescue

[0201] Vero RCB2 cells were cultivated in serum free MEM supplemented with 4 mM glutamine. Cells were seeded at 7.5×10e5/well in a 6 well dish containing 2 mL of media and incubated overnight at 37° C., 5% CO₂ in a humid incubator. The next day, the media was removed and the cell monolayer washed twice with Opti-MEM and incubated with 2 mL Opti-MEM at 37° C., 5% CO₂ in a humid incubator.

[0202] To rescue virus, Vero RCB2 cells were transfected with plasmids expressing the antigenome for DB1-Quad-mKate2 RSV or MV-014-210 (DB1-Quad-mKate2 RSV with 210 insert as described in Example 1) with helper plasmids expressing codon deoptimized RSV N, P, M2.1 and L cloned into the pXT7 vector and a plasmid expressing the T7 RNA polymerase.

[0203] Transfection mixtures were assembled for each condition by mixing 15 uL of Lipofectamine 2000CD into 250 uL Opti-MEM and incubating the mixture for 5 min. at room temperature. In a separate tube, plasmid DNA containing the antigenome of DB1-Quad-mKate2 (RSV vector) or MV-014-210 (1.5 ug) was mixed with plasmids expressing RSV-N (1 ug), RSV P (1 ug), RSV M2-1 (0.75 ug), RSV L (0.5 ug) and the T7 RNA polymerase (1.25 ug). The plasmid DNA mixtures were added to 250 uL of Opti-MEM in a 1.5 mL microfuge tube and incubated for 5 min. at room temperature. The DNA-Opti-MEM mixture was combined with the lipofectamine-Opti-MEM mixture and vortexed for 5 seconds and then incubated for 30 min at room temperature. The media in the 6 well plate was removed and the DNA-lipofectamine mixture was slowly added to the cell monolayer. The cells were incubated at room temperature for 1 h with gentle rocking. At the end of this incubation, 2 mL of Opti-MEM was added to each well and the cells were incubated overnight at 37° C., 5% CO₂ in a humid incubator.

[0204] The next day the media was removed and replaced with 2 mL of 1×MEM supplemented with 10% fetal bovine serum and 1× antibiotics.

[0205] FIGS. 4 A and B provides fluorescence and brightfield images of virus foci (TRITC) and cytopathic effects (brightfield) on Vero cell monolayers that were passaged multiple times after transfection with MV-014-210 and RSV helper plasmids. Shown is a large focus at 10× magnification (FIG. 4A) and evidence for extensive replication and spread at 2.5× magnification (FIG. 4B). Fluorescence images were generated using TRITC filter set to visualize mKate2 expression. Virus stocks were prepared as cell free lysates from infected Vero cells were used to infect fresh Vero cell monolayers in a 24 well plate at different dilutions (FIG. 4C). The formation of foci after infection with cell free lysates is consistent with isolation of intact infectious particles that infect via the chimeric spike-F protein. Fluorescence images was generated using the Celigo imaging instrument set to detect mKate2 expression.

[0206] This experiment demonstrated that plasmids encoding a recombinant RSV with a chimeric coronavirus spike protein/RSV F protein are suitable for use in the preparation of a vaccine.

### Example 3—Vaccination with MV-014-212 Protects Primates from SARS-CoV-2 Challenge and Results in Specific Neutralization of Both MVK-014-212 and the B.1.351 Variant

### Design and Generation of MV-014-212 and MVK-014-212-B.1.351

[0207] MV-014-212 is a novel live attenuated, recombinant vaccine against SARS-CoV-2, based on the backbone of the human respiratory syncytial virus (RSV) (FIG. 1). The attachment and fusion proteins G and F of RSV were replaced by a chimeric protein consisting of the ectodomain and transmembrane (TM) domains of SARS-CoV-2 spike (strain USA-WA1/2020) and the cytoplasmic tail of RSV F (line19 strain). The sequence of amino acids at the junction between spike and F proteins is shown in FIG. 1. Notably, the chimeric spike/RSV F protein retains functionality as MV-014-212 growth relies on it for attachment and fusion with the host cell. Various chimeric spike constructs that differed in the junction position were assessed for growth in Vero cells (FIG. 2). In particular, a construct with the entire native SARS-CoV-2 spike was evaluated (MV-014-300, FIG. 2). While this construct could be rescued, it did not propagate efficiently in cell culture. Results of rescue experiments are shown in TABLE 3.

TABLE 3

| | | Achieved Titers ≥ |
|---|---|---|
| Vaccine candidate | Rescue | 10⁵ PFU/mL |
| MV-014-210 | Y | Y |
| MV-014-211 | Y | N.D. |
| MV-014-212 | Y | Y |
| MV-014-220 | Y | N.D. |
| MV-014-230 | N | N |
| V-014-240 | N | N |
| MV-014-300 | Y | N |

[0208] Of the constructs expressing different chimeric spike/RSV F fusion proteins, MV-014-212 was selected for further evaluation based on the ease of rescue and its ability to grow to acceptable titers for pre-clinical and clinical studies.

[0209] The RSV backbone used to generate MV-014-212 was attenuated for replication in primary cells by codon deoptimization of the genes encoding the proteins NS1 and NS2 that suppress host innate immunity (Meng et al. (2014) mBio 5(5):e01704-14). In addition, the short hydrophobic glycoprotein SH was deleted to increase transcription of downstream genes (Bukreyev 1997).

[0210] To facilitate the development of a microneutralization assay, a reporter virus derived from MV-014-212 was also constructed by inserting the gene encoding the fluorescent mKate2 protein (Hotard et al. (2012) Virology 434(1):129-36, Shchervo et al. (2009) Biocherm J. 418(3):567-74) upstream of the NS1 gene (MVK-014-212, K for mKate, FIG. 1, bottom).

[0211] SARS-CoV-2 has a high rate of mutation and new variants evolve rapidly. Recently, variant strains of SARS-CoV-2 have raised concern because they present mutations in the spike RBD suspected to lead to the loss of neutralizing epitopes and consequent evasion of immunity raised by vaccination or natural infection with the ancestral strains of SARS-CoV-2 Wuhan-1 or USA/WA2020 (identical in the spike coding region). Of note is the variant B.1.351 which carries 8 mutations in the spike protein, 3 of which reside in the RBD: K417N, E484K and N501Y (Tegally et al. (2020) Nature 592(7854):438-443). In particular, E484K was also identified through repeated passage in the presence of neutralizing sera to isolate neutralizing escape mutants (Andreano et al. (2020) bioRxiv [Preprint]. December 28:2020.12.28.424451). Several studies have shown that neutralizing antibodies elicited by the currently marketed vaccines or present in convalescent sera are less efficient at neutralizing the B.1.351 variant compared to the Wuhan-1 strain (Wang et al. (2021) Nature 592(7855):616-622; Liu et al. (2021) N Engl J Med. 2021 Apr. 15; 384(15):1466-1468; Madhi et al. (2021) N Engl J Med. 384(20):1885-1898; Wibmer et al. (2021) Nat Med. 27(4):622-625).

[0212] Accordingly, a variant of MVK-014-212, MVK-014-212-B.1.351, was generated incorporating the mutations in spike observed in the SARS-CoV-2 variant B.1.351. The variations in MVK-014-212-B.1.351 relative to MVK-014-212 are listed in TABLE 4.

TABLE 4
Mutations in the B.1.351 strain of SARS-CoV-2 relative
to the USA/WA-2020 strain used in this study.
Mutations in B.1.351
(UA-WA/2020 to B.1.351)
D80A
D215G
dLLA 214-3
K417N
E484K
N501Y
D614G
A701V

[0213] All recombinant virus constructs were electroporated into Vero cells and infectious virus was rescued and propagated for further characterization (Hotard (2012), supra). Briefly, Vero cells were electroporated with the bacterial artificial chromosome (BAC) encoding MV-014-212 (or the reporter viruses) together with helper plasmids encoding the T7 polymerase and the RSV proteins N, P, M2-1 and L, under the control of a CMV promoter (FIG. 5). During recovery from electroporation, the cells were monitored for evidence of cytopathic effect (CPE). In MV-014-212, CPE is observed as the formation of polynucleated bodies or syncytia and eventual cell detachment (FIG. 6). The electroporated cells were expanded until the CPE was extensive and the virus stock was harvested as a total cell lysate. The titers obtained for MV-014-212 and derived viruses were comparable and within the range 1-5 10⁵ PFU/mL. FIG. 6 shows micrographs taken during the rescue of MV-014-212 and MVK-014-212.

[0214] The protein sequence of the chimeric coronavirus spike/RSV F protein in MVK-014-212-B.1.351 is provided at SEQ ID NO: 62, and the nucleic acid sequence encoding the protein is provided at SEQ ID NO: 63. The full-length virus sequence of MVK-014-212-B.1.351 (containing the mKate marker) is provided at SEQ ID NO: 64, and the full-length virus sequence of MV-014-212-B.1.351 (not containing the mKate marker) is provided at SEQ ID NO: 65. The sequence of a BAC comprising MVK-014-212-B.1.351 (containing the mKate marker) is provided at SEQ ID NO: 66, and the sequence of a BAC comprising MV-014-212-B.1.351 (not containing the mKate marker) is provided at SEQ ID NO: 67.

### In Vitro Characterization of MV-014-212

[0215] The SARS-CoV-2 spike protein contains a cleavage site between the S1 and S2 domains that is processed by furin-like proteases (FIG. 7 and Hoffmann et al. (2020) Mol Cell 78(4):779-784.e5). As for other coronaviruses, the S1 and S2 subunits of SARS-CoV-2 spike are believed to remain non-covalently bound in the prefusion conformation after cleavage (Walls et al. (2020) Cell 181(2):281-292.e6, Burkard et al. (2014) PLoS Pathog. 10(11):e1004502). To determine if the chimeric spike protein encoded by MV-014-212 is expressed and proteolytically processed, virus stocks prepared from lysates of infected Vero cells were analyzed on western blots and probed with polyclonal antiserum against SARS-CoV-2 spike protein. Both MV-014-212 and MVK-014-212 viruses express the full length and cleaved forms of the chimeric spike protein (FIG. 8A), consistent with partial cleavage at the S1-S2 junction, with apparent sizes in agreement with the expected (FIG. 8A, Ou et al. (2020) Nat Commun. 11(1):1620, Erratum in: Ou et al. (2021) Nat Commun 12(1):2144: Peacock et al. (2020) Nat Microbiol. doi: 10, 1038).

[0216] The growth kinetics of MV-014-212 was compared to wild type recombinant RSV A2 in Vero cells (FIG. 8B). Vero cells were infected at an MOI of 0.01 PFU/cell and infectious virus from total cell lysates was quantified by plaque assay at 0, 12, 24, 48, 72, 96 and 120 hours post-infection (hpi). MV-014-212 exhibited delayed growth kinetics relative to RSV A2 showing an initial lag phase of approximately 12 hours. Both viruses reached their peak titers at 72 hpi and the titers remained constant until 120 hpi. The peak titer for MV-014-212 was approximately one order of magnitude lower than that of RSV A2. To determine if the insertion of the mKate2 gene affected replication kinetics of MVK-014-212, Vero cells were infected with MV-014-212 or MVK-014-212 at an MOI of 0.01 PFU/cell and infectious virus was measured at 3, 24 and 72 hpi by plaque assay. The growth kinetics of MVK-014-212 was similar to that of MV-014-212 reaching comparable peak titers by 72 hpi (FIG. 8C). These data are consistent with a report that insertion of mKate2 in the first gene position did not significantly attenuate RSV A2-line19F in vitro (Hotard et al (2012), supra).

[0217] To evaluate the short-term thermal stability of MV-014-212, aliquots of the viral stock were incubated at different temperatures for a period of 6 hours and the amount of infectious virus after the incubation was determined by plaque assay. Two stocks of MV-014-212 prepared in different excipients were compared in this study (FIG. 8D). The results demonstrate that MV-014-212 is stable for at least 6 hours in either excipient at −80° C. and room temperature.

[0218] The genetic stability of MV-014-212 was examined by serial passaging in Vero cells. Subconfluent Vero cells were infected in triplicate with an aliquot of MV-014-212 and passaged for 10 consecutive passages (FIG. 9). Viral RNA was isolated from passages 0 and 10 and amplified by RT-PCR. The sequence of the entire coding regions of the viral genome was determined by Sanger sequencing. The results showed for all three lineages there were no variation detected at passage 10 relative to the starting stock (passage 0). The vaccine candidate was genetically stable in vitro.

### MV-014-212 Replication is Attenuated in African Green Monkeys and Confers Protection Against Wt SARS-CoV-2 Challenge

[0219] African green monkeys (AGMs) support replication of wt SARS-CoV-2 (Woolsey et al. (2021) Nat Immunol. 22(1):86-98, Cross et al. (2020) Virol. 7(1):125, Blair (2021) Am J Pathol. 191(2):274-282, Lee et al. (2021) Curr Opin Virol. 48:73-81) and RSV (Taylor (2017) Vaccine 35(3):469-480) and therefore constitute an appropriate non-human primate model for studying the attenuation and protective immunity of MV-014-212.

[0220] The AGM study design is depicted in FIG. 10. On Day 0, AGMs were inoculated via the intranasal (IN) and intratracheal (IT) routes with 1.0 mL of 3×10⁵ PFU/mL MV-014-212 or wt RSV A2 at each site for a total dose of 6×10⁵ PFU per animal. AGMs are only semi permissive for both SARS-CoV-2 and RSV so intratracheal inoculation was necessary to allow replication of the vaccine or the challenge SARS-CoV-2 in the lungs. Animals in the mock group were similarly mock-inoculated with PBS. Nasal swabs (NS) and Bronchoalveolar lavage (BAL) samples were collected through day 12 after immunization. Viral shedding in NS and BAL samples was determined by plaque assay using fresh samples that were not frozen at the study site. The results, shown in FIGS. 11A-B, showed that the level of infectious virus in animals inoculated with MV-014-212 and duration of shedding in nasal secretions was lower than animals inoculated with RSV (FIG. 11A). The mean peak titer for RSV was approximately 20-fold higher than that observed for MV-014-212 inoculated animals. These results show that MV-014-212 is attenuated in the upper respiratory tract of AGMs compared to RSV.

[0221] Low to undetectable virus titers were also observed in the lower respiratory tract of animals inoculated with MV-014-212 or RSV strain A2 over the course of 12 days. Both viruses replicated at low levels, but peak levels occurred earlier for MV-014-212. In this study RSV A2 showed 2 to 3 log lower peak titers in the lower respiratory tract of AGMs compared to wild-type RSV A2 titers reported in literature (Cheng et al. (2001) Virology 283(1):59-68; Jin et al. (2003) Vaccine 21(25-26):3647-52; Tang et al. (2004) J Virol. 78(20):11198-207; Le Nouën et al. (2014) Proc Natl Acad Sci USA. 111(36):13169-74) confounding the ability to demonstrate attenuation of MV-014-212 in the lungs. Subsequently, lower rA2 titers were also observed in the lungs of cotton rats (see Example 4 and FIG. 12A-D), relative to biologically derived RSV strains suggesting that rA2 used in this study was attenuated in lungs.

[0222] Nasal and BAL samples from day 6 post vaccination were used to extract RNA for sequence analyses of the spike gene of MV-014-212. Using Sanger sequencing no variations in the Spike gene were detected compared to the reference sequence for MV-014-212.

[0223] On day 28 AGMs were challenged with 1×10⁶ TCID₅₀ of wt SARS-CoV-2. NS and BAL samples were collected for 10 days after challenge. Shedding of wt SARS-CoV-2 was measured by RT-qPCR of the E gene sub-genomic SARS-CoV-2 RNA (sgRNA) (FIGS. 13A-B).

[0224] MV-014-212 vaccinated monkeys had low or undetectable levels of wt SARS-CoV-2 sgRNA in NS samples in contrast to animals inoculated with wt RSV A2 or PBS (mock) which had higher levels of SARS-CoV-2 sgRNA. While the level of SARS-CoV-2 sgRNA was undetectable in animals vaccinated with MV-014-212 at most time points, one animal had detectable SARS-CoV-2 sgRNA at day 2 and a different animal had similar titers at day 4 post-challenge. Mean peak titers of SARS-CoV-2 in NS of animals in the control RSV and PBS groups were 20 and 250-fold higher than for animals vaccinated with MV-014-212, respectively. In both RSV and mock infected animals shedding of wt SARS-CoV-2 sgRNA decreased steadily in nasal secretions from day 4 to 10 and by day 10 all animals in both groups had undetectable SARS-CoV-2 sgRNA.

[0225] Vaccination with MV-014-212 increased clearance of SARS-CoV-2 in lungs compared to animals inoculated with RSV A2 or mock-inoculated with PBS. The peak titer of SARS-CoV-2 in BAL samples occurred at Day 2 and was similar in all three treatment groups. Lung titers were undetectable in MV-014-212 vaccinated animals on Day 4 through day 10 while SARS-CoV-2 was readily measured in animals inoculated with RSV A2 or mock-inoculated with PBS. Previously, minor amounts of sgRNA were detected in the inoculum (BIOQUAL, unpublished results) so some of the signal detected on day 1 of shedding could be attributed to the inoculum.

[0226] Taken together, these data show that a single mucosal administration of MV-014-212 protected AGMs from wt SARS-CoV-2 challenge.

MV-014-212 Elicits Spike-Specific Antibody Responses in AGMs that are Broadly Neutralizing and Offer Moderate Protection Against a Variant of Concern.

[0227] SARS-CoV-2 spike-specific serum IgG and nasal IgA were measured by ELISA (see schematic at FIG. 14A and IgA standard curve at FIG. 14B) in sera and nasal swabs, respectively, from AGMs immunized with MV-014-212, RSV A2, or PBS on Day 25 post-immunization. All animals were seronegative for RSV and SARS-CoV-2 at the start of the study. AGMs inoculated with MV-014-212 produced higher levels of SARS-CoV-2 spike-specific IgG in serum compared to AGMs inoculated with RSV A2 or PBS, which had levels of Spike-specific IgG that were close to the limit of detection (FIG. 15A).

[0228] Spike-specific IgA was also detected in the nasal swabs of monkeys inoculated with MV-014-212. There was more than an 8-fold increase in nasal Spike-specific IgA in the MV-014-212 vaccinated animals 25 days after vaccination (FIG. 15B). In contrast, RSV or mock vaccinated animals did not show a significant change in IgA.

[0229] These results showed that mucosal inoculation of MV-014-212 induced both nasal and systemic antibody responses to the functional SARS-CoV-2 spike.

[0230] To determine if neutralizing antibodies to wild-type SARS-CoV-2 spike protein or the B.1.351 variant were elicited in monkeys vaccinated with MV-014-212, a microneutralization assay was conducted using the reporter viruses MVK-014-212 and MVK-014-212-B.1.35. An additional reporter virus, wild-type recombinant RSV A2 labelled with mKate2 (rA2-mKate) was included as a negative control. The neutralizing titers for 2 AGMs before (“Pre”) and after vaccination (“Imm”) are shown in FIG. 15C. A significant increase in neutralization was observed for the homologous reporter (MVK-014-212) following vaccination (see also FIG. 17). A moderate cross neutralization against the B.1.351 variant was also observed, with the average NT50 of the variant being approximately 7-fold lower than for the homologous virus. This reduction in neutralizing titers for the B.1.351 variant is of the same order as that reported for other vaccines (Planas et al (2021) Nat Med. 27(5):917-924, Liu et al. (2021), supra, Wang el al. (2021) Nature 592(7855):616-622).

[0231] Accordingly, the example demonstrates that infection with MV-014-212 induced a SARS-CoV-2 Spike-specific mucosal IgA response, generated serum neutralizing antibodies against Spike-expressing pseudovirus, including the variant B.1.351, and was highly protective against SARS-CoV-2 challenge in the upper and lower respiratory tract.

### Discussion

[0232] MV-014-212 is a recombinant live attenuated COVID-19 vaccine designed to be administered intranasally to stimulate mucosal as well as systemic immunity against SARS-CoV-2. MV-014-212 was engineered to express a functional SARS-CoV-2 spike protein in place of the RSV membrane surface proteins F, G and SH in an attenuated RSV strain expressing codon deoptimized NS1 and NS2 genes. Indeed, replication of MV-014-212 was attenuated in the respiratory tract of African green monkeys following mucosal administrations in the nose and trachea and it elicited S ARS-CV-2 spike-specific mucosal IgA and serum IgG. Furthermore, vaccination with MV-014-212 induced serum neutralizing antibodies and protected against SARS-CoV-2 challenge. These data suggest that a single mucosal immunization with a live attenuated COVID-19 vaccine can induce protective immunity against SARS-CoV-2 in non-human primates.

[0233] MV-014-212 is genetically stable and accumulation of variants was not detected when the virus was serially passaged ten times in Vero cells. This contrasts with another recombinant live attenuated COVID-19 vaccine based on the VSV backbone (Yahalorm-Ronen et al. (2020) Nat Commun. 11(1):6402) where mutations arose at passage 9 in Vero E6 cells. One of these mutations occurred in the multi-basic S1/S2 furin cleavage site and another generated a stop codon that resulted in a 24-amino acid truncation of the Spike cytoplasmic tail. Truncation of the Spike cytoplasmic tail was also reported when wt SARS-CoV-2 (Ou, supra) or pseudotyped SARS-CoV -2 (Case et al (2020) Cell Host Microbe 28(3):475-485.e5, Dieterle et al (2020) Cell Host Microbe 28(3):486-496.e6) were propagated in tissue culture. The Spike gene of MV-014-212 from nasal swabs and BAL of African green monkeys was also analyzed by Sanger sequencing and no variations were observed compared to the reference sequence. Therefore, the chimeric Spike gene in MV-014-212 appears to have a stable genotype in vitro and in viva.

[0234] African green monkeys are semi permissive for RSV (Taylor, supra) and wt SARS-CoV-2 replication (Woolsey et al, supra, Cross et al., supra, Blair et al, supra, Lee et al. supra) and were selected for evaluating MV-014-212 instead of Rhesus monkeys. MV-014-212 vaccinated monkeys had low or undetectable levels of wt SARS-CoV-2 sgRNA in NS samples after challenge in contrast to RSV and PBS immunized groups. Vaccination with MV-014-212 also increased clearance of SARS-CoV-2 in lungs. wt SARS-CoV-2 shedding detected by RT-qPCR of subgenomic E gene peaked early on day 1 or 2 in the upper and lower respiratory tract of RSV and PBS immunized groups. This was similar to the shedding kinetics detected by RT-qPCR of the viral genome and by plaque assay reported by Cross et al., supra and Woolsey et al., supra for wt SARS-CoV-2/INMI1-Isolate/2020/Italy in AGMs. The levels of peak SARS-CoV-2 subgenomic RNA observed in RSV and mock vaccinated groups were comparable to those observed in unvaccinated Rhesus monkeys (Corbett et al (2020) Nature 586(7830):567-571, Vogel et al (2020) bioRxiv 2020 (09.08.280818; doi: doi.org/10.1101/2020.09.08.280818), Mercado et al (2020) Nature 586(7830):583-588, van Doremalen et al. (2020) Nature 586(7830):578-582).

[0235] Immunization of AGM with MV-014-212 resulted in both mucosal and systemic antibody responses. There was approximately 100-fold more Spike-specific total serum IgG in MV-014-212 vaccinated AGM compared to AGM that received wt RSV A2 or PBS inoculations. Spike-specific IgA was also detected in nasal swabs of MV-014-212 immunized animals. There was approximately an 8-fold increase in IgA concentration 25 days following vaccination with MV-014-212. In contrast, RSV or mock-immunized monkeys did not show a rise in IgA concentration. In an experimental human challenge study, low RSV F specific mucosal IgA was a better predictor for susceptibility to RSV challenge in seropositive adults than serum antibody levels (Habibi et al (2015) Am J Respir Crit Care Med. 191(9):1040-9). Indeed, Spike RBD-specific dimeric serum IgA was shown to be more potent at neutralizing SARS-CoV-2 than monomeric IgG (Wang et al, supra). By inference, secretory IgA which exists at mucosal surfaces as dimeric IgA may act as a potent inhibitor of SARS-CoV-2 at the site of infection. Interestingly, Sterlin et al ((2021) Sci Transl Med. 13(577):eabd2223) recently reported that IgA antibodies dominate early humoral responses in human SARS-CoV-2 infections and IgA plasmablasts with mucosal homing potential peaked during the third week of disease onset. A rise in SARS-CoV-2 neutralizing antibody response was detected against MVK-014-212, an mKate2-expressing MV-014-212 virus. A neutralizing antibody response was also detected against a reporter virus with the spike of B.1.351, a variant of concern from South Africa. The NT50 against B.1.351 was approximately 7 fold lower compared to the homologous USA-WA2020 spike. AGMs are semi-permissive for RSV and SARS-CoV-2 precluding a direct comparison to titers observed in human convalescent and post-vaccination serum associated with protection against COVID-19. No correlates of protection have been established in humans for COVID-19 vaccines approved for emergency use. However, MV-014-212 vaccinated AGMs achieved a level of protection that is comparable to those observed with EUA vaccines in Rhesus monkeys (Corbett et al. (2020), supra, Vogel et al. (2021), supra, Mercado et al (2020), supra., van Doremalen et al. (2020), supra).

[0236] According to the May 14, 2020 “The Landscape of candidate vaccines in clinical development” (see website at who.int/publications/m/item/draft-landscape-of-covid-19-candidate-vaccines) prepared by WHO, there are 101 COVID-19 vaccines currently in clinical development worldwide. Among these candidates only 7 are intranasal vaccines (TABLE 5). Two other intranasal vaccine candidates are live attenuated viruses. Unlike these vaccine candidates, MV-014-212 is a non-segmented negative strand RNA virus not prone to recombine in nature. RNA recombination is extremely rare for non-segmented negative strand RNA viruses outside of experimental co-infections in laboratory settings and there is no mechanism for reassortmnent (Spaan 2003, Han 2011, Tan 2012).

TABLE 5
Intranasal COVID-19 vaccine in clinical development 2021

| | | | | Phase of |
|---|---|---|---|---|
| | | | | clinical |
| Platform | Description | Doses | Developer | development |
| Live | Attenuated RSV expressing | 1 | Meissa | 1 |
| attenuated | functional Spike protein | | | |
| virus | | | | |
| Live | COVI-VAC | 1-2 | Codagenix/Serum | 1 |
| attenuated | | | Institute of India | |
| virus | | | | |
| Replicating | DelNS1-2019-nCoV-RBD- | 2 | University of Hong | 2 |
| viral vector | OPT1 (Intranasal flu-based- | | Kong, Xiamen | |
| | RBD) | | University and | |
| | | | Beijing Wantai | |
| | | | Biological | |
| | | | Pharmacy | |
| Non | AdCOVID, Adenovirus- | 1-2 | Altimmune, Inc. | 1 |
| replicating | based platform expresses the | | | |
| viral vector | receptor-binding domain | | | |
| | (RBD) of the Sars-Cov-2 | | | |
| | spike protein | | | |
| Non | BBV154, Adenoviral vector | 1 | Bharat Biotech | 1 |
| replicating | COVID-19 vaccine | | International | |
| viral vector | | | Limited | |
| Inactivated | Live recombinant Newcastle | 2 | Laboratorio Avi- | 1 |
| virus | Disease Virus (rNDV) vector | | Mex | |
| | vaccine | | | |
| Protein | CIGB-669 (RBD + AgnHB) | 3 | Center for Genetic | 1/2 |
| subunit | | | Engineering and | |
| | | | Biotechnology | |
| | | | (CIGB) | |

[0237] The vaccine profile of MV-014-212 is unique among the current COVID-19 vaccines that have emergency use authorization or are in clinical development. MV-014-212 is administered intranasally, a needle-free route that offers potential advantages for global immunization. The intranasal route is similar to the natural route of infection of SARS-CoV-2 and generates both mucosal and humoral immune responses in AGMs without any adjuvant formulation. Modeling based on yields from production of Phase 1 clinical study material projected a potential close output of hundreds of millions of doses per annum in a modestly sized facility using high intensity bioreactor systems. Mucosally delivered live attenuated vaccines such as MV-014-212 entails minimum downstream processing and has an anticipated low cost of goods. In addition, needle-free delivery reduces supply risks. Overall, MV-014-212 is well-suited for domestic and global deployment as a primary vaccine or as a heterologous booster. M4V-014-21 I's currently being evaluated as a single dose intranasal vaccine in a Phase I clinical trial (NCT04798001).

### Materials and Methods

### Cells and Animals

[0238] Vero RCB1 (WHO Vero RCB 10-87) cells were grown in minimal essential medium (MEM, Gibco) containing 10% fetal bovine serum (FBS, Corning) and 1× Corning Antibiotic/Antimycotic mix consisting of 100 I.U./mL Penicillin, 100 μg/mL Streptomycin 0.25 μg/mL Amphotericin with 0.085 g/L NaCI. RCB2 Cells are derived from RCB1 and have been adapted to grow in serum-free media. RCB2 cells used in this study were grown in serum-free medium OptiPro (Gibco) supplemented with 4 mM of L-glutamine (Gibco). Both Vero cell lines were cultured at 37° C., 5% CO₂ with 95% humidity.

[0239] African green monkeys (Chlorocebus aethiops) were obtained in St Kitts and were of indeterminate age, weighing ˜3-6 kg. The monkeys were screened and verified to be seronegative for RSV and SARS-CoV-2 by an RSV microneutralization assay and spike SARS-CoV-2 ELISA (BIOQUAL). Animals also underwent a physical examination by the veterinary staff to confirm appropriate health status prior to study. Each AGM was uniquely identified by a tattoo. One male and 3 females were assigned to the MRV-014-212 and RSV groups. 2 females and 1 male were assigned to the Mock group. Cage-side observations included mortality, moribundity, general health and signs of toxicity. Clinical observations included skin and fur characteristics, eye and mucous membranes, respiratory, circulatory, autonomic and central nervous systems, somatomotor, and behavior patterns. The body weight of each monkey was recorded before the start of the dosing period and at each time of sedation. Consistent with the overall low levels of MV-014-212 replication in the respiratory tract of AGMs, no adverse events that were considered treatment-related were observed following inoculation with the vaccine. On Day 16 post-vaccination one monkey inoculated with MV-014-212 died unexpectedly. Death occurred 4 days after the last NS and BAL sample collection. A definitive determination of the cause of death could not be ascertained based on macroscopic or microscopic postmortem evaluations; however, there was no evidence that suggests the death was vaccine related. Moreover, the deceased animal had the lowest titer in NS samples compared to the other animals in this treatment group with only one swab containing virus that was above the detection limit of the plaque assay (50 PFU/mL) and no detectable infectious virus in BAL at any of the time points evaluated.

[0240] Male and female K18-hACE2 Tg (strain #034860, B6.Cg-Tg[K18-ACE2]2Prlmn/J) mice were procured from The Jackson Laboratory (Bar Harbor, Me.) and were approximately 8-10 weeks old at the time of vaccination.

[0241] The animal studies were conducted in compliance with all relevant local, state, and federal regulations and were approved by the BIOQUAL Institutional Animal Care and Use Committee (IACUC).

### Plasmid Construction

[0242] The recombinant MV-014-212 and derived viruses were cloned in the antigenome orientation in bacterial artificial chromosomes (BAC) under the control of the T7 polymerase promoter (Hotard et al (2012), supra). The BACs containing the recombinant MV-014-212 and MVK-014-212 sequences were constructed by restriction digestion and ligation from the DB1-QUAD and kRSV-DB1-QUAD plasmids (encoding the antigenome of an attenuated version of RSV with or without the mKate gene, respectively, Rostad el al. (2018), supra). The DNA sequence encoding the chimeric spike protein was designed to contain compatible cloning sites and it was synthesized by Twist Biosciences. The kRSV-DB1-QUAD plasmid and spike insert were digested with the enzymes AatII and SalI (NIB) and ligated with T4 DNA ligase (NIB) overnight at 16° C. Stabl3 chemically competent cells (Invitrogen) were transformed with the ligation mix and selected for chloramphenicol resistance for 20-24 hours at 32° C. MV-014-212 BAC was derived from the MVK-014-212 vector by removing the fragment between the KpnI and AatII restriction sites (˜7 kb containing the mKate gene) and replacing it with the corresponding fragment extracted from DB1-QUAD by restriction digestion and ligation. For all the constructs, the sequences of the entire encoded viruses were confirmed via Sanger sequencing.

[0243] The construction of the plasmid rA2-mkate (a.k.a. kRSV-A2) was described in Rostad el al. (2016) J Virol. 90(16):7508-7518.

### Virus Rescue and Harvest

[0244] The recombinant viruses were rescued by electroporation of RCB2 cells with the BAC plasmid and 5 helper plasmids based on the pCDNA3.1 expression plasmid, each encoding one of the following: T7 polymerase, RSV A2 N, RSV A2 P, RSV A2 M2-1 or RSV A2 L proteins. The cells were recovered in SFM-OptiPro medium supplemented with 4 mM glutamine and 10% fetal bovine serum (Hyclone) for 2 passages and then expanded in serum free medium with glutamine until CPE was extensive.

[0245] The recombinant viruses were harvested in Williams E (Hyclone) supplemented with SPG or SPG alone by scraping the infected cells directly into the media. The lysate was vigorously vortexed to release the viral particles and flash frozen. One cycle of thawing and vortexing was performed to increase the release of virus before the stocks were aliquoted, flash-frozen and stored at −70° C. until use.

[0246] The composition of the SPG medium is shown in TABLE 6.

TABLE 6
Composition of SPG

| | | | | | Final |
|---|---|---|---|---|---|
| | | Catalog | | Quantity | Molarity |
| Ingredient | Supplier | number | Lot number | (g) | (M) |
| Potassium phosphate | JT | 3250 | 0000246987 | 13.56 | 0.078 |
| Dibasic (K₂HPO₄) | Baker/Avantor | | | | |
| Potassium phosphate | JT | 3248 | 0000248923 | 5.17 | 0.038 |
| Monobasic (KH₂PO₄) | Baker/Avantor | | | | |
| Sucrose C₁₂H₂₂0₁₁ | JT | 4074 | 0000243012 | 746.22 | 2.18 |
| | Baker/Avantor | | | | |
| L-Glutamic acid | Sigma Aldrich | G8415 | SLCC1249 | 7.94 | 0.054 |
| HO₂CCH₂CH₂CH(NH₂)CO₂H | | | | | |
| 5N Sodium Hydroxide | EMD | SX0607L-6 | HC97338720 | TBD | Trace |
| (amount to adjust to pH | Millipore | | | | |
| 7.1) | | | | | |
| WFI Water | HyClone | SH30221.10 | AE29421224 | Adjust to | NA |
| | | | | one liter | |

[0247] Plaque assays for all the viruses used were done in 24-well plates with Vero cells. Cells at 70% confluence were inoculated with 100 μl of 10-fold serial dilutions of viral samples (10-1 to 10-6). Inoculation was carried out at room temperature with gentle rocking for 1 h before adding 0.75% methylcellulose (Sigma) dissolved in MEM supplemented with 10% FBS and IX Corning Antibiotic/Antimycotic mix. Cells were incubated for 4-5 days at 32° C. before fixing in methanol and immunostaining. For MV-014-212 and MVK-014-212 we used Rabbit anti-SARS-CoV-2 spike polyclonal antibody (Sino Biological) and Goat anti-rabbit HRP-conjugated secondary antibody (Jackson ImmunoResearch). For rA2-mKate the reagents used were Goat anti-RSV primary antibody (Millipore) and Donkey anti-goat HRP-conjugated secondary antibody (Jackson ImmunoResearch). In all cases, the viral plaques were stained with AEC (Sigma). The limit of detection is 1 PFU per well, corresponding to a minimum detectable titer of 100 PFU/ml.

### RNA Sequencing

[0248] RNA from MV-014-212 samples was extracted using QIAamp® Viral RNA Mini Kit following the protocol suggested by the manufacturer. The quality and concentration of the extracted RNA were evaluated by gel electrophoresis and UV spectrophotometry. The extracted RNA was used as the template for reverse transcription (RT) using Invitrogen SuperScript® IV First-Strand Synthesis System using a specific primer or random hexamers. The cDNA 2nd strand was synthesized with the Platinum™ SuperFi™ PCR Master Mix. The purified PCR products were directly sequenced using the BigDye® Terminator v3.1 Cycle Sequencing Kit (Applied Biosystems). The sequencing reactions were purified using Sephadex G-50 purification and analyzed on ABI 3730xl DNA Analyzer. The sequence traces were assembled using Sequencher software and the assembly was manually confirmed. The RNA sequencing for this study was performed by Avance Biosciences Inc., Houston Tex.,

### Western Blot

[0249] Viruses and control recombinant SARS-CoV-2 Spike protein (LakePharma, San Carlos, Calif.) were denatured with Laemmli sample buffer (Alfa Aesar, Ward Hill, Mass.) by heating at 95° C. for 10 minutes. Proteins were separated by SDS-PAGE in a 4-15% gradient gel and transferred to PVDF membranes using a transfer apparatus according to the manufacturer's protocol (BIO-RAD, Hercules, Calif.). After transfer, blots were washed in deionized water and probed using the iBind Flex system according to the manufacturer's protocol. Rabbit anti-SARS-CoV-2 Spike (Sino Biological Inc, Beijing, China) was diluted in iBind solution (Invitrogen, Carlsbad, Calif.) at 1:1000. HRP conjugated anti-Rabbit IgG (Jackson ImmunoResearch, Philadelphia, Pa.) was diluted in iBind Solution at 1:5000. Blots were washed in deionized water and developed with ECL system (Azure Biosystems, Dublin, Calif.) according to manufacturer's protocol. The blots were stripped with Restore Western Blot Stripping Buffer (ThermoFisher, Carlsbad, Calif.) and reprobed with goat anti-RSV polyclonal antisera (Sigma-Aldrich, St. Louis, Mo.) and a monoclonal antibody specific for GAPDH (6C5) protein (ThermoFisher, Carlsbad, Calif.).

### Plague Assay for Detecting Virus Shedding in AGMs

[0250] Nasal swabs (NS) and bronchoalveolar lavage (BAL) samples were collected and stored on ice until assayed for vaccine shedding by plaque assay. Vero cells were seeded in 0.5 mL per well at 1×10⁵ cells/mL in culture media in 24 well plates. The plates were incubated overnight at 37° C. in a humid incubator containing 5% CO₂. The samples were diluted in DMEM without serum by adding 30 μL of nasal swab or BAL to 270 μL of DMEM. A total of six 10-fold serial dilutions were prepared in DMEM from 10-1 to 10-6. The media was removed from the 24 well plate and 100 μL of each dilution was added to duplicate wells of the 24 well plate of Vero cells. The plate was incubated at room temperature with constant rocking on a Rocker 35EZ, Model Rocker 35D (Labnet, Edison, N.J.) for 1 h. At the end of this incubation, 1 mL of methyl cellulose media (MEM supplemented with 10% fetal bovine serum, 1× antibiotic/antimycotic, and 0.75% methyl cellulose) was added to each well. The plate was incubated at 34° C. for 6 days in a humid incubator containing 5% CO₂.

[0251] The plaques were visualized by immunostaining using RSV or SARS-CoV-2 antibodies. For immunostaining, the methyl cellulose media was aspirated, and the cell monolayers were washed with 1 mL of PBS at room temperature. The PBS was removed, and the cells were fixed by the addition of 1 mL of methanol to each well and the plate was incubated at room temperature for 15 minutes. The methanol was removed and cells washed with 1 mL of PBS followed by the addition of 1 mL Blotto solution (5% non-fat dried milk in Tris-buffered saline, Thermo-Fisher). The plates were incubated at room temperature for 1 h. The Blotto solution was removed, and 0.25 mL of primary goat anti-RSV polyclonal antibodies (Millipore, Hayward, Calif.) diluted 1 to 500 in Blotto was added to RSV infected cells. Cells infected with MV-014-212 were stained with primary rabbit anti-SARS-CoV-2 spike protein polyclonal antisera (Sino Biologicals, Beijing, CN). The plates were incubated for 1 h at room temperature with constant rocking. Primary antibodies were removed and wells were washed with 1 mL Blotto solution.

[0252] For RSV infected cells, 0.25 mL of donkey anti-goat HRP-conjugated polyclonal antisera (Jackson ImmunoResearch, West Grove, Pa.) diluted 1:250 in Blotto was added to each well. For MV-014-212 infected cells goat anti-rabbit HRP-conjugated polyclonal antisera (Jackson ImmunoResearch, West Grove, Pa.) diluted 1:250 in Blotto was added to each well. The pate was incubated for 1 h at room temperature with constant rocking. After incubation, the secondary antibodies were removed and the wells washed with 1 mL of PBS. Developing solution was prepared by diluting AEC substrate 1 to 50 in 1×AEC buffer solution. A total of 0.25 mL of developing solution was added to each well and the plate was incubated at room temperature for 15 to 30 minutes with constant rocking until red immunostained plaques were visible by eye. The developing reaction was terminated by rinsing the plate under tap water. The plaques were enumerated, and titers were calculated.

### RT-qPCR of SARS-CoV-2 Sub Genomic RNA for Detecting Shedding of Challenge Virus

[0253] The standard curve was prepared from frozen RNA stocks and diluted to contain 106 to 107 copies per 3 μL. Eight 10-fold serial dilutions of control RNA were prepared using RNAse-free water to produce RNA concentrations ranging from 1 to 107 copies/reaction.

[0254] The plate was placed in an Applied Biosystems 7500 Sequence detector and amplified using the following program: 48° C. for 30 minutes, 95° C. for 10 minutes followed by 40 cycles of 95° C. for 15 seconds, and 1 minute at 55° C. The number of copies of RNA per mL of sample was calculated based upon the standard curve.

[0255] Total RNA from tissues was extracted using RNA-STAT 60 (Tel-test “B”)/chloroform followed by precipitation of the RNA and resuspension in RNAse-free water. To detect SARS-CoV-2 sgRNA, a primer set and probe were designed to detect a region of the leader sequence and E gene RNA from SARS-CoV-2. The F gene mRNA is processed during replication to contain a 5′ leader sequence that is unique to sgRNA (not packaged into the virion) and therefore can be used to quantify sgRNA. A standard curve was prepared using known quantities of plasmid DNA containing the E gene sequence including the unique leader sequence to produce a concentration range from 1 to 10⁶ copies/reaction. The PCR reactions were assembled using 45 μL master mix (Bioline, Memphis, Tenn.) containing 2× buffer, Taq-polymerase, reverse transcriptase and RNAse inhibitor. The primer pair was added at 2 μM. 5 μL of the sample RNA was added to each reaction in 96-well plate. The PCR reactions were amplified in an Applied Biosystems 7500 Sequence detector using the following conditions: 48° C. for 30 minutes, 95° C. for 10 minutes followed by 40 cycles of 95° C. for 15 seconds, and 1 minute at 55° C.

[0256] Primers/Probe sequences are shown below:

SG-F:
(SEQ ID NO: 127)
CGATCTTGTAGATCTGTTCCTCAAACGAAC
SG-R:
(SEQ ID NO: 128)
ATATTGCAGCAGTACGCACACACA
(SEQ ID NO: 129)
FAM-ACACTAGCCATCCTTACTGCGCTTCG-BHQ

### SARS-CoV-2 Total IgG ELISA for AGM Sera

[0257] MaxiSorp immuno plates (Thermo-Fisher, Waltham, Mass.) were incubated overnight at 4° C. with 100 μL of 0.65 μg/mL of SARS-CoV-2 spike prepared in PBS (Pre-S SARS-CoV-2 Spike, Nexelis). The protein solution was removed and the plate was washed 4 times with 250 μL of PBS supplemented with 0.05% Tween 20 (PBST). Blocking solution (PBST containing 5% non-fat dried milk) was added at 200 μL per well and the plate was incubated for 1 h at room temperature. A SARS-CoV-2 spike specific IgG (Nexelis) was diluted in blocking solution and used as a standard. Negative control serum was diluted 1:25 in blocking solution. Serum samples were diluted at 1:25 followed by eight 2-fold serial dilutions in blocking solution. The blocking solution was removed from the plate and the wells washed once with 250 μL of PBST followed by addition of 100 μL of the diluted serum samples and controls and the plate was incubated for 1 h at room temperature. The plate was washed 4 times with 250 μL PBST and 100 μL of HRP-conjugated goat anti-monkey IgG antibody (PA1-8463, Thermo Fisher, Waltham, Mass.) diluted in blocking solution was added to each well following the last wash step. The plate was incubated for 1 h at room temperature and then washed 4 times in 250 μL PBST. Developing solution containing 3, 3′, 5, 5′-Tetramethylbenzidine (TMB) substrate (1-Step Ultra TMB-ELISA Substrate Solution, ThermoFisher) was added to each well and the plate was incubated at room temperature for 30 minutes to allow the color to develop. The colorimetric reaction was terminated by the addition of 100 μL of ELISA Stop Solution (Invitrogen). The absorbance at 450 nm and 650 nm was read by spectrophotometry using a SpectraMax iD3 microplate reader (Molecular Devices, San Jose, Calif.).

### SARS-CoV-2 IgA ELISA for AGM Nasal Swabs

[0258] Purified pre-fusion SARS-CoV-2 spike antigen (LakePharma) was adsorbed onto 96-well MaxiSorp immuno microplate (Thermo-Fisher). The positive control was a serum pool from three COVID-19 convalescent individuals (Nexelis). Total IgA purified from human serum was used as a standard (Sigma-Aldrich, St. Louis, Mo.). To generate the IgA standard curve anti-human IgA capture antibodies Mab MT57 (MabTech) were absorbed on plates instead of Spike antigen. Following incubation, the microplate was washed 4× with 250 μL. PBST and blocked with 1% BSA in PBST. Purified human IgA standard, controls or sample dilutions were then added and incubated in the coated microplate to allow binding. The plates were washed and a biotinylated goat anti-human IgA antibody (Mabtech) with cross reactivity to monkey antibodies was added to all wells. Excess biotinylated anti-IgA antibody was removed by washing and streptavidin-conjugated HRP (Southern Biotech) was added. TMB was added and color development was stopped by addition of stop solution from Invitrogen. The absorbance of each well was measured at 450 nm. The standard total IgA antibody assayed on each test plate was used to calculate the concentration of IgA antibodies against spike protein in the AGM samples expressed in the arbitrary units ELU/mL. The measurements were performed in duplicates and average values are reported with standard deviations.

### Microneutralization Assay

[0259] As shown in the schematic in FIG. 18, heat-inactivated sera from the AGMs were diluted serially in MEM with non-essential amino acids (Gibco) and antibiotics/antimycotic. All experiments were done in duplicate. 200 PFU of the desired reporter virus were added to each dilution and incubated at room temperature for one hour. Confluent RCB1 cells grown in a clear-bottom black 96-well plate (Grenier) were infected with the serum-virus mixes and centrifuged (spinoculated) at 1,800×g for 30 minutes at 20° C. The plates were incubated for 20 h at 37° C. and 5% CO₂. The fluorescent foci in each well were counted using a Celigo Image Cytometer (Nexcelom) and converted to % inhibition using the formula below:

$$\% inhibition = 100 \times [ 1 - \frac{( L - MIN )}{( MAX - MIN )} ]$$

where MIN is the average number of foci obtained in the control wells with only cells (no virus) and MAX is the average number of foci from the wells in the control wells with only virus (no serum). L is the number of foci in the sample wells. The resulting curves of inhibition vs. dilution of the sera were fitted using non-linear regression, option “[inhibitor] vs normalized response-variable slope” in GraphPad Prism (version 9.0.0). From the fitting, IC50 was obtained and NT50 was calculated as the reciprocal of IC50.

### Example 4—MV-014-212 Elicits Th1 Skewed Cellular Immune Response in hACE2-Mice

[0260] Mice models of vaccine-associated enhanced respiratory disease (VAERD) suggest that an imbalance in type 1 (Th1) and type 2 (Th2) T helper cell immunity with a skewing towards Th2 response contributes to enhanced lung pathology following challenge (Boelen 2000). To assess the balance of Th1 and Th2 immunity generated after vaccination with MV-014-212, transgenic mice expressing human ACE-2 receptor were inoculated with a single dose of V-014-212 or PBS by the intranasal route. A control group received an intramuscular prime and boost vaccination with SARS-CoV-2 spike protein formulated in alum which has been shown to skew immunity towards a Th2 response (Corbett et al., supra). On Day 28, serum was collected to measure total spike-specific IgG, IgG2a and IgG1 by ELISA. In addition, spleens were collected and the number of splenocytes expressing interferon-γ (IFNγ) and IL-5 were measured by ELISpot assay. The ratio of IgG2a/IgG1 and the ratio of cells producing IFNγ/IL-5 are indicators of Th1-biased cellular immune response (Corbet et al., supra, van der Fits et al. (2020) NPJ Vaccines 5(1):49).

[0261] The results showed that MV-014-212 induced spike-reactive splenocytes as measured by ELISpot assay (FIG. 19A). Importantly, MV-014-212 induced higher numbers of splenocytes expressing IFNγ relative to IL-5 when cell suspensions were stimulated with a spike peptide pool suggesting that vaccination with MV-014-212 produced a Th1-biased immune response. The ratio of IFNγ producing cells to IL-5 producing cells in the MV-014-212 group was more than one order of magnitude higher than in the group vaccinated with alum-adjuvanted spike protein, (FIG. 19B). Consistent with the ELISpot data, the ratios of IgG2a/IgG1 detected in serum were higher in the animals vaccinated with MV-014-212 than the control group vaccinated with alum-adjuvanted spike (FIGS. 19C and D). These data suggest that intranasal vaccination with live attenuated, recombinant MV-014-212 induced a Th1-biased antiviral immune response.

### Discussion

[0262] In the mice model, MV-014-212 immunization elicited a Th1-biased cellular immune response. More IFNγ producing T cells were detected in splenocytes of hACE mice immunized with MV-014-212 than IL-5 secreting T cells. Furthermore, the ratio of IgG2a/IgG1 isotypes in MV-014-212 hACE2 mice was approximately 1000-fold higher compared to hACE2 mice that received alum-adjuvanted Spike protein immunization. No correlates of protection have been established for COVID-19 vaccines approved for emergency use. However, MV-014-212 vaccinated AGMs achieved a level of protection that is comparable to those observed with EUA vaccines (Corbett et al., supra, Vogel et al., supra, Mercado et al., supra, van Doremalen et al., supra).

### Materials and Methods

[0263] SARS-CoV-2 Total IgG ELISA hACE2-Mice

[0264] SARS-CoV-2 spike protein was linked to the spike protein signal sequence at the N terminus and a histidine tag was added to the C terminus of the protein. The SARS-CoV-2 spike protein was expressed in HEK293T cells and purified to homogeneity on a AKTA chromatography system using Ni-Sepharose Excel (GE) resin (Global Life Sciences Solutions, Marlborough, Mass.). MaxiSorp immuno plates (Thermo-Fisher, Waltham, Mass.) were incubated overnight at 4° C. with 100 μL of 0.5 mg/mL of SARS-CoV-2 spike prepared in PBS. The protein solution was removed and the plate was washed 3 times with 300 μL of PBS supplemented with 0.1% Tween 20 (PBST). Blocking solution (PBST containing 5% non-fat dried milk) was added at 200 μL per well and the plate was incubated for 1 h at 37° C. A SARS-CoV-2 spike-specific IgG was diluted in blocking solution and used as a standard. Positive and negative control sera was diluted 1:25 in blocking solution. Positive control serum was generated at Nexelis by immunizing mice with the SARS-CoV-2 RBD protein. Negative control serum was obtained from naïve mice. Serum samples were diluted at 1:25 followed by eight 2-fold serial dilutions in blocking solution. The blocking solution was removed from the plate and the wells washed once with 300 μL of PBST followed by addition of 100 μL of the diluted serum samples and controls. The plate was incubated for 2 h at 37° C. Following incubation plate was washed 3 times with 300 μL PBST and 100 μL of HRP-conjugated goat anti-mouse antibody (A140-201P; Bethyl Laboratories, Montgomery, Tex.) diluted in blocking solution was added to each well following the last wash step. The plate was incubated at for 1 h at 37° C. and then washed 3 times in 300 μL PBST. Developing solution containing 3, 3′, 5, 5′-Tetramethylbenzidine (TMB) substrate (BioRad, Hercules, Calif.) was added to each well and the plate was incubated at 37° C. for 30 min to allow the color to develop. The colorimetric reaction was terminated by the addition of 100 μL of 0.36 N sulfuric acid stop solution. The absorbance at 450 nm and 650 nm was read by spectrophotometry using a SpectraMax iD3 microplate reader (Molecular Devices, San Jose, Calif.).

### Spike Specific IgG1 and IgG2a ELISA

[0265] Serum samples from mice were collected on Day −21 and on Day 28 post vaccination to quantify the levels of SARS-CoV-2 spike-specific IgG1 and IgG2a antibodies by ELISA. Purified perfusion-stabilized SARS-CoV-2 spike protein (SARS-CoV-2/human/USA/WA1/2020, from LakePharma) was diluted to 1 μg/mL in PBS and 100 μL was added to each well of a Maxisorp immuno plates (Thermo-Fisher) and incubated overnight at 4° C. The plate was washed 4 times in PBST (PBS+0.05% Tween 20) and 100 μL of blocking solution (PBST+2% BSA) was added to each well and the plate was incubated for 1 hour at room temperature. Serum dilutions were prepared in blocking solution with the first dilution at 1:25 for the IgG1 assay or 1:10-1:100 for the IgG2a assay. SARS-CoV-2 spike IgG1 (Sino Biological) or anti-spike-RBD-mIgG2a (InvivoGen) were diluted in blocking solution and used as standards for the assay.

[0266] The blocking solution was removed and 100 μL of diluted antibody were added to each well. The plate was incubated at room temperature for 1 h and then washed 4 times in PBST using the plate washer. Then, 100 μL of HRP-conjugated goat-anti-mouse IgG1 (Thermo Fisher) or HRP-conjugated goat-anti-mouse IgG2a (Thermo Fisher) secondary antibodies diluted 1:32,000 and 1:1000, respectively, were added to each well and the plate was incubated at room temperature for 1 h. The plate was washed 4 times in PBST. 100 μL of 1-step ultra TMB-ELISA substrate solution (Thermo Fisher) was added to each well and the plate incubated for 30 min with constant rocking on an orbital shaker. After the incubation period, 100 μL of stop solution (Invitrogen) was added to each well and the plate read on a Spectramax id3 plate reader (Molecular Devices) at 450 nm and 620 nm.

ELISPOT of Splenocytes from MV-014-212 Vaccinated hACE2-Mice

[0267] Spleens from vaccinated ACE-2 mice were collected on Day 28 post-inoculation and stored in DMEM containing 10% FBS on ice until processed. The spleens were homogenized on a sterile petri dish containing medium. The homogenate was filtered through a 100 μm cell strainer and the cell suspension transferred to a sterile tube on ice. The cells were collected by centrifugation at 200×g for 8 min at 4° C. The supernatant was removed and residual liquid on the edge of the tube blotted with a clean paper towel. Red blood cells were lysed by resuspending the cell pellet in 2 mL of ACK lysis buffer (155 mM ammonium chloride, 10 mM potassium bicarbonate, 0.1 mM EDTA) and incubating the samples at room temperature for approximately 5 min. PBS was added at 2× to 3× of the volume of cell suspension and cells were collected by centrifugation at 200×g for 8 min at 4° C. The cell pellet was washed twice in PBS and the cells collected by centrifugation at 200×g for 8 min at 4° C. The supernatant was removed and the pellet resuspended in 2 mM L-Glutamine CTL-Test Media (Cell Technology Limited, OH, USA). The suspension was filtered through a 100 μm cell strainer into a new 15 mL conical tube and the cells counted using a hemocytometer and resuspended at the appropriate cell concentration. Cells were maintained at 37° C. in a humidified incubator with 5% CO₂ until used in the ELISpot assay.

[0268] The ELISpot assay was performed using a mouse IFNγ/IL-5 Double-Color ELISPOT assay kit (Cell Technology Limited, OH, USA). Murine IFNγ/IL-5 Capture Solution and 70% ethanol was prepared according to the manufacturer's protocol (Cell Technology Limited, OH, USA). The membrane on the plate was activated by addition of 15 μL of 70% ethanol to each well. The plate was incubated for less than one minute at room temperature followed by addition of 150 μL PBS. The underdrain was removed to drain the solution in the wells and each well was washed twice with PBS. Murine IFNγ/IL-5 Capture Solution (80 μL) was added to each well and the plate was sealed with parafilm and incubated at 4° C. overnight. The Capture Solution was removed and the plate washed one time with 150 μL PBS. A peptide pool containing peptides of 15 amino acids in length that span the SARS-CoV-2 spike protein (PepMix™ SARS-CoV-2 Spike Glycoprotein, JPT Peptide Technologies, Berlin Del.) were prepared at 10 mg/mL and 100 μL was added to each well. A positive control containing Concanavalin A (Con A) mitogen (10 μg/mL) was added to a separate reaction mixture. The splenocytes were mixed with CTL-Test™ Medium (Cell Technology Limited, OH, USA) to yield a final cell density of 3,000,000 cells/mL and 100 μL/well were added to the plate using large orifice tips. The plate was incubated at 37° C. in a humidified incubator containing 9% CO2 for 24 hours. The plates were washed twice with PBS and then twice with 0.05% Tween-PBS at a volume of 200 μL/well for each wash followed by addition of 80 μL/well anti-murine IFNγ/IL-5 Detection Solution (Cell Technology Limited, OH, USA). The plates were incubated at room temperature for two hours. The plate was washed three times with PBST at 200 μL/well for each wash followed by the addition of 80 μL/well of Tertiary Solution (Cell Technology Limited, OH, USA). The plates were incubated at room temperature for one hour. The plate was washed twice with PBST, and then twice with 200 μL/well of distilled water. Blue Developer Solution (Cell Technology Limited, OH, USA) was added at 80 μL/well and the plate will be incubated at room temperature for 15 min. The plate was rinsed three times in tap water to stop the developing reaction. After the final wash, Red Developer Solution (Cell Technology Limited, OH, USA) was added at 80 μL/well and the plate was incubated at room temperature for 5-10 min. The plate was rinsed three times to stop the developing reaction. The plate was air-dried for 24 hours face down on paper towels on the bench top. The spots on the plate representing splenocytes expressing IFNγ (red) or IL-5 (blue) were quantified using the CTL-Immunospot plate reader (ImmunoSpot 7.0.23.2 Analyzer Professional DC\ImmunoSpot 7, Cellular Technology Limited) and software (CTL Switchboard 2.7.2).

### Example 5—Phase I Clinical Trial

[0269] In this example, a vaccine to SARS-CoV-2, the novel coronavirus causing COVID-19 disease, is evaluated. The vaccine is administered as drops or a spray in the nose. Specifically, the study analyzes the safety of, and the immune response to, the vaccine when administered to healthy adults between the ages of 18 and 69 years. who are seronegative to SARS-CoV-2.

[0270] Cohort A (18-55 years) will enroll first. The first 10 participants (Group 1) will receive Dosage 1 of vaccine. After review of Group 1 safety data through Day 3, the next 20 participants (Group 2) receive Dosage 2 of vaccine. After review of Group 2 safety data through Day 3, the final group of 50 participants (Group 3) in Cohort A receive Dosage 3 of vaccine. A subgroup in Group 3 receive Dosage 3 of vaccine via nasal spray, whereas the remainder of participants receive administration by nasal drops. A 2nd subgroup in Cohort A receive a 2^{nd}, identical vaccine dose at Day 36, whereas the remainder of participants receive a single dose of vaccine (at Day 1).

[0271] After review of Cohort A safety data through Day 15, Cohort B (56-69 years) enroll. The first 10 participants (Group 4) receive Dosage 1 of vaccine. After review of Group 4 safety data through Day 3, the next 20 participants (Group 5) receive Dosage 2 of vaccine. After review of Group 5 safety data through Day 3, the final group of 20 participants (Group 6) in Cohort A receive Dosage 3 of vaccine. All participants in Cohort B receive a single dose of vaccine and are administered the dose by nasal drops. Within each group of Cohorts A and B, a sentinel dosing approach will be implemented as an additional safety measure.

TABLE 7

| Arm | Intervention |
|---|---|
| Experimental: Cohort A/Dosage Group 1 | Biological/Vaccine: vaccine against SARS- |
| (intranasal drops)/Single Dose | CoV-2 [MV-014-212] Dosage 1, Single Dose, |
| Participants in this arm (18-55 years) receive | Intranasal Drops |
| a single intranasal dose of the SARS-CoV-2 | Single intranasal dose on Day 1, by intranasal |
| vaccine at Dosage 1 in the form of intranasal | drops |
| drops on Day 1. | |
| Experimental: Cohort A/Dosage Group 2 | Biological/Vaccine: vaccine against SARS- |
| (intranasal drops)/Single Dose | CoV-2 [MV-014-212] Dosage 2, Single Dose, |
| Participants in this arm (18-55 years) receive | Intranasal Drops |
| a single intranasal dose of the SARS-CoV-2 | Single intranasal dose on Day 1, by intranasal |
| vaccine at Dosage 2 in the form of intranasal | drops |
| drops on Day 1. | |
| Experimental: Cohort A/Dosage Group 3a | Biological/Vaccine: vaccine against SARS- |
| (intranasal drops)/Single Dose | CoV-2 [MV-014-212] Dosage 3, Single Dose, |
| Participants in this arm (18-55 years) receive | Intranasal Drops |
| a single intranasal dose of the SARS-CoV-2 | Single intranasal dose on Day 1, by intranasal |
| vaccine at Dosage 3 in the form of intranasal | drops |
| drops on Day 1. | |
| Experimental: Cohort A/Dosage Group 3a | Biological/Vaccine: vaccine against SARS- |
| (intranasal drops)/Two Doses | CoV-2 [MV-014-212] Dosage 3, Two Doses, |
| Participants in this arm (18-55 years) receive | Intranasal Drops |
| an intranasal dose of the SARS-CoV-2 | Intranasal dose on Day 1 by intranasal drops. |
| vaccine at Dosage 3 in the form of intranasal | Followed by a second, identical dose on Day |
| drops on Day 1. These participants receive a | 36 by intranasal drops |
| second, identical dose of the SARS-CoV-2 | |
| vaccine at Dosage 3 in the form of intranasal | |
| drops on | |
| Day 36. | |
| Experimental: Cohort A/Dosage Group 3b | Biological/Vaccine: vaccine against SARS- |
| (intranasal spray)/Single Dose | CoV-2 [MV-014-212] Dosage 3, Single Dose, |
| Participants in this arm (18-55 years) receive | Intranasal Spray |
| a single intranasal dose of the SARS-CoV-2 | Single intranasal dose on Day 1, by intranasal |
| vaccine at Dosage 3 in the form of a nasal | spray |
| spray on Day 1. | |
| Experimental: Cohort B/Dosage Group 4 | Biological/Vaccine: vaccine against SARS- |
| (intranasal drops)/Single Dose | CoV-2 [MV-014-212] Dosage 1, Single Dose, |
| Participants in this arm (56-69 years) receive | Intranasal Drops |
| a single intranasal dose of the SARS-CoV-2 | Single intranasal dose on Day 1, by intranasal |
| vaccine at Dosage 1 in the form of intranasal | drops |
| drops on Day 1. | |
| Experimental: Cohort B/Dosage Group 5 | Biological/Vaccine: vaccine against SARS- |
| (intranasal drops)/Single Dose | CoV-2 [MV-014-212] Dosage 2, Single Dose, |
| Participants in this arm (56-69 years) receive | Intranasal Drops |
| a single intranasal dose of the SARS-CoV-2 | Single intranasal dose on Day 1, by intranasal |
| vaccine at Dosage 2 in the form of intranasal | drops |
| drops on Day 1. | |
| Experimental: Cohort B/Dosage Group 6 | Biological/Vaccine: vaccine against SARS- |
| (intranasal drops)/Single Dose | CoV-2 [MV-014-212] Dosage 3, Single Dose, |
| Participants in this arm (56-69 years) receive | Intranasal Drops |
| a single intranasal dose of the SARS-CoV-2 | Single intranasal dose on Day 1, by intranasal |
| vaccine at Dosage 3 in the form of intranasal | drops |
| drops on Day 1. | |

### Outcome Measures

[0272] The Primary Outcome Measures that are determined include solicited adverse events (AEs), unsolicited AEs, serious adverse events (SAEs), medically attended adverse events (MAEs), and change in serum neutralizing antibody titers against the vaccine-encoded SARS-CoV-2 S protein. Solicited and unsolicited AEs are determined in the period immediately post-vaccination. SAEs and MAEs are determined throughout the full study duration (about 1 year). The change in serum titer of neutralizing antibodies against vaccine-encoded SARS-CoV-2 S protein are determined from baseline through day 29, an average of five (5) weeks.

[0273] The frequency of solicited AEs are measured, categorized by severity. Solicited AEs are predefined AEs that may occur after vaccine administration.

[0274] The frequency of unsolicited AEs are measured, categorized by severity. Unsolicited AEs are any untoward medical occurrences in a participant administered the vaccine, regardless of causal relationship to the vaccine. Unsolicited AEs can include unfavorable and unintended signs (including abnormal laboratory findings), symptoms, or diseases temporally associated with the use of the vaccine.

[0275] The frequency of SAEs are measured, categorized by vaccine-relatedness. SAEs are AEs, whether considered causally related to the vaccine or not, that threaten life or result in any of the following: death, inpatient hospitalization or prolongation of existing hospitalization, persistent or significant incapacity or substantial disruption of the ability to conduct normal life functions, or congenital anomaly/birth defect.

[0276] The frequency of MAEs are measured, categorized by vaccine-relatedness. MAEs are AEs, whether considered causally related to the vaccine or not, with unscheduled medically attended visits, such as urgent care visits, acute primary care visits, emergency department visits, or other previously unplanned visits to a medical provider. Scheduled medical visits such as routine physicals, wellness checks, ‘check-ups’, and vaccinations, are not considered MAEs.

[0277] Change in serum neutralizing antibody (nAb) titers against vaccine-encoded SARS-CoV-2 S protein are measured per participant from baseline through day 29, an average of five (5) weeks.

[0278] Secondary Outcome Measures that are determined include (1) change in serum binding antibody concentrations against vaccine-encoded SARS-CoV-2 S protein, (2) frequency, magnitude, and duration of potential vaccine virus shedding.

[0279] Change in serum binding antibody concentrations are measured per participant from baseline through day 29, an average of five (5) weeks.

[0280] The frequency of any post-vaccination shedding of vaccine virus (as detected by viral culture) are measured per dosage group and overall from baseline through Day 29, an average of four (4) weeks. If post-vaccination shedding of vaccine virus is detected by culture, peak viral titer (measured in plaque forming units, PFU) will be measured per dosage group and overall from baseline through Day 29, an average of four (4) weeks. If post-vaccination shedding of vaccine virus is detected by culture, duration of shedding (in days) are measured per dosage group and overall from baseline through Day 29, an average of four (4) weeks.

Eligibility Criteria for this Study
[0281] Ages Eligible for Study: 18 Years to 69 Years
[0282] Sexes Eligible for Study: All
[0283] Gender Based: No
[0284] Accepts Healthy Volunteers: Yes

[0285] Inclusion Criteria:
[0286] Healthy adults ≥18 and <56 years (Cohort A) and 56 years and <70 years (Cohort B) as determined at the day of signing informed consent
[0287] SARS-CoV-2 RT-PCR (nasal swab) negative at Day 1 pre-dose
[0288] Women of childbearing potential (WOCBP) or male subjects with partners who are WOCBP must agree to practice contraception during their study participation from the signing of informed consent for at least 3 months after the final MV-014-212 administration.
[0289] Written informed consent

[0290] Exclusion Criteria:
[0291] Diagnosis of chronic pulmonary disease (e.g. chronic obstructive pulmonary disease, asthma, pulmonary fibrosis, cystic fibrosis). Resolved childhood asthma is not exclusionary.
[0292] Immunocompromised state due to comorbidities or other conditions as detailed in the study protocol
[0293] Nasal obstruction (including due to anatomic/structural causes, acute or chronic rhinosinusitis, or other causes)
[0294] Healthcare worker, long-term care or nursing home facility resident or employee, member of an emergency response team, or other occupation with high risk of exposure to SARS-CoV-2, and those working outside the home in customer facing occupations (e.g. waiter, cashier or store clerk, public transportation or taxi driver)
[0295] Positive serum pregnancy test during Screening and/or positive urine pregnancy test on Day 1
[0296] Breastfeeding during any period of study participation
[0297] Occupational or household exposure to children <5 years of age or to immunocompromised persons
[0298] Any medical disease or condition that, in the opinion of the PI, precludes study participation. This includes acute, subacute, intermittent or chronic medical disease or condition that would place the subject at an unacceptable risk of injury, render the subject unable to meet the requirements of the protocol, or may interfere with the evaluation of responses or the subject's successful completion of this trial

[0299] It is expected that subjects inoculated with MV-014-212 will exhibit an increase in serum titer of neutralizing antibodies against vaccine-encoded SARS-CoV-2 S protein as well as an increase in serum binding antibody concentrations against vaccine-encoded SARS-CoV-2 S protein.

[0300] Sequences provided in the sequence listing herein are shown in TABLE 8:

TABLE 8

| SEQ ID | |
|---|---|
| NO: | Description |
| 1 | Spike protein from insert 210 |
| 2 | Spike protein from insert 211 |
| 3 | Spike protein from insert 212 |
| 4 | Spike protein from insert 220 |
| 5 | Spike protein from insert 230 |
| 6 | Spike protein from insert 240 |
| 7 | DNA encoding Spike protein from insert 210 |
| 8 | DNA encoding Spike protein from insert 211 |
| 9 | DNA encoding Spike protein from insert 212 |
| 10 | DNA encoding Spike protein from insert 220 |
| 11 | DNA encoding Spike protein from insert 230 |
| 12 | DNA encoding Spike protein from insert 240 |
| .3 | Vaccine candidate MV-014-210 antigenome (DNA) |
| 14 | Vaccine candidate MV-014-211 antigenome (DNA) |
| 15 | Vaccine candidate MV-014-212 antigenome (DNA) |
| 16 | Vaccine candidate MV-014-220 antigenome (DNA) |
| 17 | Vaccine candidate MV-014-230 antigenome (DNA) |
| 18 | Vaccine candidate MV-014-240 antigenome (DNA) |
| 19 | GGGGGG |
| 20 | GGGGT |
| 21 | GGGPPP |
| 22 | GGGAPPP |
| 23 | Wild type coronavirus spike protein |
| 24 | DNA encoding wild type spike protein |
| 25 | KARSTPVTLSKDQLSGINNIAFSN-RSV F protein cytoplasmic tail (subgroup A) |
| 26 | KARSTPITLSKDQLSGINNIAFSN-RSV F protein cytoplasmic tail (subgroup B) |
| 27 | IMITTIIIVIIVILLSLIAVGLLLYC-RSV F protein TM domain (subgroup A) |
| 28 | IMITAIIIVIIVVLLSLIAIGLLLYC-RSV F protein TM domain (subgroup B) |
| 29 | GKSTTN |
| 30 | GKSTTNIMITTIIIVIIVILLSLIAVGLLLYCKARSTPVTLSKDQLSGINNIAFSN |
| | (subgroup A) |
| 31 | GKSTTNIMITAIIIVIIVVLLSLIAIGLLLYCKARSTPITLSKDQLSGINNIAFSN |
| | (subgroup B) |
| 32 | GLLLYCKARSTPVTLSKDQLSGINNIAFSN (subgroup A) |
| 33 | YCKARSTPVTLSKDQLSGINNIAFSN (subgroup A) |
| 34 | CKARSTPVTLSKDQLSGINNIAFSN (subgroup A) |
| 35 | KARSTPVTLSKDQLSGINNIAFSN (subgroup A) |
| 36 | ARSTPVTLSKDQLSGINNIAFSN (subgroup A) |
| 37 | GLLLYCKARSTPITLSKDQLSGINNIAFSN (subgroup B) |
| 38 | YCKARSTPITLSKDQLSGINNIAFSN (subgroup B) |
| 39 | CKARSTPITLSKDQLSGINNIAFSN (subgroup B) |
| 40 | KARSTPITLSKDQLSGINNIAFSN (subgroup B) |
| 41 | ARSTPITLSKDQLSGINNIAFSN (subgroup B) |
| 42 | RQSR |
| 43 | RRRR |
| 44 | codon-deoptimized NS1 gene |
| 45 | codon-deoptimized NS2 gene |
| 46 | BAC DB1 Quad mKate |
| 47 | Insert 210 |
| 48 | Insert 211 |
| 49 | Insert 212 |
| 50 | Insert 220 |
| 51 | Insert 230 |
| 52 | Insert 240 |
| 53 | Insert 300 |
| 54 | Full vector encoding RSV plus insert 210 (BAC DB1 Quad mKate background) |
| 55 | Full vector encoding RSV plus insert 211 (BAC DB1 Quad mKate background) |
| 56 | Full vector encoding RSV plus insert 212 (BAC DB1 Quad mKate background) |
| 57 | Full vector encoding RSV plus insert 220 (BAC DB1 Quad mKate background) |
| 58 | Full vector encoding RSV plus insert 230 (BAC DB1 Quad mKate background) |
| 59 | Full vector encoding RSV plus insert 240 (BAC DB1 Quad mKate background) |
| 50 | Wild type 300 insert (mKate) in BAC backbone |
| 61 | Wild type 300 insert in RSV backbone (MV-014-300 antigenome DNA, Kateless). |
| 62 | Spike protein MV-014-212-B.1.351 |
| 63 | Spike nucleotide MV-014-212-B.1.351 |
| 64 | MVK-014-212-B.1.351 |
| 65 | MV-014-212-B.1.351 |
| 66 | BAC MVK-014-212-B.1.351 |
| 67 | BAC MV-014-212-B.1.351 |
| 68 | Spike protein MV-014-212-B.1.1.7 |
| 69 | Spike nucleotide MV-014-212-B.1.1.7 |
| 70 | MVK-014-212-B.1.1.7 |
| 71 | MV-014-212-B.1.1.7 |
| 72 | BAC MVK-014-212-B.1.1.7 |
| 73 | BAC MV-014-212-B.1.1.7 |
| 74 | Spike protein MV-014-212-CAL20.C |
| 75 | Spike nucleotide MV-014-212-CAL20.C |
| 76 | MVK-014-212-CAL20.C |
| 77 | MV-014-212-CAL20.C |
| 78 | BAC MVK-014-212-CAL20.C |
| 79 | BAC MV-014-212-CAL20.C |
| 80 | Spike protein MV-014-212-P.1 |
| 81 | Spike nucleotide MV-014-212-P.1 |
| 82 | MVK-014-212-P.1 |
| 83 | MV-014-212-P.1 |
| 84 | BAC MVK-014-212-P.1 |
| 85 | BAC MV-014-212-P.1 |
| 86 | Spike protein MV-014-212-Del-Fur |
| 87 | Spike nucleotide MV-014-212-Del-Fur |
| 88 | MVK-014-212-Del-Fur |
| 89 | MV-014-212-Del-Fur |
| 90 | BAC MVK-014-212-Del-Fur |
| 91 | BAC MV-014-212-Del-Fur |
| 92 | Spike protein MV-014-212 R682Q |
| 93 | Spike nucleotide MV-014-212 R682Q |
| 94 | MVK-014-212 R682Q |
| 95 | MV-014-212 R682Q |
| 96 | BAC MVK-014-212 R682Q |
| 97 | BAC MV-014-212 R682Q |
| 98 | Spike protein MV-014-213 |
| 99 | Spike nucleotide MV-014-213 |
| 100 | MVK-014-213 |
| 101 | MV-014-213 |
| 102 | BAC MVK-014-213 |
| 103 | BAC MV-014-213 |
| 104 | MVK-014-210 |
| 105 | MVK-014-211 |
| 106 | MVK-014-212 |
| 107 | MVK-014-220 |
| 108 | MVK-014-230 |
| 109 | MVK-014-240 |
| 110 | Spike protein MV-014-215 |
| 111 | Spike nucleotide MV-014-215 |
| 112 | MVK-014-215 |
| 113 | MV-014-215 |
| 114 | BAC MVK-014-215 |
| 115 | BAC MV-014-215 |
| 116 | Influenza virus HA CT: X₁GX₂X₃X₄CX₅ICI; where X₁ is N or K; X₂ is S or N; X₃ |
| | is L, T, M, or C; X4 is Q or R; X5 is R, n or T |
| 117 | Influenza virus HA CT: NGSX₁X₂CX₃ICI; where X₁ is L, C or M. X₂ is Q or R; |
| | X₃ is R or N |
| 118 | Influenza virus HA CT: X₁GNX₂RCX₃ICI; where X₁ is K, N or R, X₂ is I or M, |
| | X₃ is N, T or Q |
| 119 | Parainfluenza virus F and/or HN protein CT: KLLTIVVANRNRMENFVYHK |
| 120 | Parainfluenza virus F and/or HN protein CT: MVAEDAPVRATCRVLFRTT |
| 121 | Measles virus F and/or HN protein CT: |
| | CCRGRCNKKGEQVGMSRPGLKPDLTGTSKSYVRSL |
| 122 | Measles virus F and/or HN protein CT: |
| | MSPQRDRINAFYKDNPHPKGSRIVINREHLMIDR |
| 123 | Mumps virus F and/or HN protein CT: YVATKEIRRINFKTNHINTISSSVDDLIRY |
| 124 | Mumps virus F and/or HN protein CT: |
| | MEPSKLFIMSDNATVAPGPVVNAAGKKTFRTCFR |
| 125 | Vesicular stomatitis virus (VSV) G protein CT: |
| | RVGIHLCIKLKHTKKRQIYTDIEMNRLGK |
| 126 | Rabies virus G protein CT: |
| | MTAGAMIGLVLIFSLMTWCRRANRPESKQRSFGGTGRNVSVTS |
| 127 | SG-F: CGATCTTGTAGATCTGTTCCTCAAACGAAC |
| 128 | SG-R: ATATTGCAGCAGTACGCACACACA |
| 129 | FAM-ACACTAGCCATCCTTACTGCGCTTCG-BHQ |
| 130 | RSV F Protein-C terminal domain comprising TM and CT in FIG. 2 |
| 131 | BAC MV-014-210 |
| 132 | BAC MV-014-211 |
| 133 | BAC MV-014-212 |
| 134 | BAC MV-014-220 |
| 135 | BAC MV-014-230 |
| 136 | BAC MV-014-240 |
| 137 | Furin cleavage site PRRA |
| 138 | Furin cleavage site mutation PQRA |
| 139 | FIG. 1 sequence |

### INCORPORATION BY REFERENCE

[0301] The entire disclosure of each of the patent and scientific documents referred to herein is incorporated by reference for all purposes.

### EQUIVALENTS

[0302] The invention may be embodied in other specific forms without departing from the spirit or essential characteristics thereof. The foregoing embodiments are therefore to be considered in all respects illustrative rather than limiting on the invention described herein. Scope of the invention is thus indicated by the appended claims rather than by the foregoing description, and all changes that come within the meaning and range of equivalency of the claims are intended to be embraced therein.

1. A chimeric protein comprising an ectodomain of a SARS-CoV-2 spike protein and a cytoplasmic tail portion of an RSV fusion (F) protein.

2. The chimeric protein of claim 1, wherein the chimeric protein comprises, in an N- to C-terminal direction, the ectodomain of the SARS-CoV-2 spike protein and the cytoplasmic tail portion of the RSV fusion (F) protein.

3. The chimeric protein of claim 1, wherein the chimeric protein further comprises a transmembrane portion of the SARS-CoV-2 spike protein.

4. The chimeric protein of claim 1, wherein the chimeric protein comprises a sequence selected from the group consisting of SEQ ID NOs: 1-6, 62, 68, 74, 80, 86, 92, 98, and 110 or a variant thereof having at least about 85% (e.g., at least about 90%, at least about 95%, at least about 96%, at least about 97%, at least about 98%, or at least about 99%) sequence identity to a sequence selected from the group consisting of SEQ ID NOs: 1-6, 62, 68, 74, 80, 86, 92, 98, and 110.

5. An immunogenic composition comprising live chimeric virus comprising a nucleic acid encoding the chimeric protein of any one of claims 1-4.

6. The immunogenic composition of claim 5, wherein the nucleic acid comprises a sequence selected from the group consisting of SEQ ID NOs: 7-12, 63, 69, 75, 81, 87, 93, 99, and 111 or a variant thereof having at least about 85% (e.g., at least about 90%, at least about 90%, at least about 95%, at least about 96%, at least about 97%, at least about 98%, or at least about 99%) sequence identity to a sequence selected from the group consisting of SEQ ID NOs: 7-12, 63, 69, 75, 81, 87, 93, 99, and 111, or an RNA counterpart of any of the foregoing, or a complementary sequence of any of the foregoing.

7. The immunogenic composition of claim 5 or claim 6, further comprising an NS1 and/or an NS2 protein of RSV.

8. The immunogenic composition of any one of claims 5-7, wherein the live chimeric virus does not comprise a gene that encodes RSV G protein.

9. The immunogenic composition of any one of claims 5-8, further comprising an adjuvant and/or other pharmaceutically acceptable carrier.

10. The immunogenic composition of claim 9, wherein the adjuvant is an aluminum gel, aluminum salt, or monophosphoryl lipid A.

11. The immunogenic composition of claim 9, wherein the adjuvant is an oil-in-water emulsion optionally comprising α-tocopherol, squalene, and/or a surfactant.

12. A method for immunizing a subject against a SARS-CoV-2 virus, the method comprising administering to the subject an effective amount of an immunogenic composition of any one of claims 4-11.

13. The method of claim 12, wherein the administration is intranasal administration.

14. The method of claim 12 or 13, wherein the immunogenic composition is administered a dose of between about 10³ and about 10⁶.

15. The method of any one of claims 12-14, wherein administration of the immunogenic composition induces a SARS-CoV-2 spike-specific mucosal IgA response or generates serum neutralizing antibodies.

16. A nucleic acid encoding the chimeric protein of claim 1 or claim 2.

17. The nucleic acid of claim 16 comprising a sequence selected from the group consisting of SEQ ID NOs: 7-12, 63, 69, 75, 81, 87, 93, 99, and 111 or a variant thereof having at least about 85% (e.g., at least about 90%, at least about 95%, at least about 96%, at least about 97%, at least about 98%, or at least about 99%) sequence identity to a sequence selected from the group consisting of SEQ ID NOs: 7-12, 63, 69, 75, 81, 87, 93, 99, and 111, or an RNA counterpart of any of the foregoing, or a complementary sequence of any of the foregoing.

18. A vector comprising a nucleic acid of claim 16 or claim 17.

19. The vector of claim 18 selected from a plasmid or a bacterial artificial chromosome.

20. The vector of claim 19, wherein the vector is a bacterial artificial chromosome comprising a sequence selected from the group consisting of SEQ ID NOs: 54-59, 66, 67, 72, 73, 78, 79, 84, 85, 90, 91, 96, 97, 102, 103, 114, 115, and 131-136 or a variant thereof having at least about 85% (e.g., at least about 90%, at least about 95%, at least about 96%, at least about 97%, at least about 98%, or at least about 99%) sequence identity to a sequence selected from the group consisting of SEQ ID NOs: 54-59, 66, 67, 72, 73, 78, 79, 84, 85, 90, 91, 96, 97, 102, 103, 114, 115, and 131-136.

21. An isolated recombinant particle comprising an NS1 and/or an NS2 protein of RSV and the chimeric F protein of claim 1 or claim 2.

22. The isolated recombinant particle of claim 21, comprising a live attenuated chimeric RSV-SARS-CoV-2 genome or antigenome.

23. A live attenuated chimeric RSV-SARS-CoV-2 antigenome comprising a sequence selected from the group consisting of SEQ ID NOs: 13-18, 65, 71, 77, 83, 89, 95, 101, 104-109, and 113 or a variant thereof having at least about 85% (e.g., at least about 90%, at least about 95%, at least about 96%, at least about 97%, at least about 98%, or at least about 99%) sequence identity to a sequence selected from the group consisting of SEQ ID NOs: 13-18, 65, 71, 77, 83, 89, 95, 101, 104-109, and 113, or an RNA counterpart of any of the foregoing, or a complementary sequence of any of the foregoing.

The application's sequence listing, which the Patent Office published only in electronic form, follows.

SEQUENCE LISTING (139 sequences)

SEQ ID NO: 1 - protein, 1278 aa, Artificial Sequence
  Description of Artificial Sequence: Synthetic polypeptide
MFVFLVLLPLVSSQCVNLTTRTQLPPAYTNSFTRGVYYPDKVFRSSVLHSTQDLFLPFFSNVTWFHAIHVSGTNGTKRFDNPVLPFNDGVYFASTEKSNIIRGWIFGTTLDSKTQSLLIVNNATNVVIKVCEFQFCNDPFLGVYYHKNNKSWMESEFRVYSSANNCTFEYVSQPFLMDLEGKQGNFKNLREFVFKNIDGYFKIYSKHTPINLVRDLPQGFSALEPLVDLPIGINITRFQTLLALHRSYLTPGDSSSGWTAGAAAYYVGYLQPRTFLLKYNENGTITDAVDCALDPLSETKCTLKSFTVEKGIYQTSNFRVQPTESIVRFPNITNLCPFGEVFNATRFASVYAWNRKRISNCVADYSVLYNSASFSTFKCYGVSPTKLNDLCFTNVYADSFVIRGDEVRQIAPGQTGKIADYNYKLPDDFTGCVIAWNSNNLDSKVGGNYNYLYRLFRKSNLKPFERDISTEIYQAGSTPCNGVEGFNCYFPLQSYGFQPTNGVGYQPYRVVVLSFELLHAPATVCGPKKSTNLVKNKCVNFNFNGLTGTGVLTESNKKFLPFQQFGRDIADTTDAVRDPQTLEILDITPCSFGGVSVITPGTNTSNQVAVLYQDVNCTEVPVAIHADQLTPTWRVYSTGSNVFQTRAGCLIGAEHVNNSYECDIPIGAGICASYQTQTNSPRRARSVASQSIIAYTMSLGAENSVAYSNNSIAIPTNFTISVTTEILPVSMTKTSVDCTMYICGDSTECSNLLLQYGSFCTQLNRALTGIAVEQDKNTQEVFAQVKQIYKTPPIKDFGGFNFSQILPDPSKPSKRSFIEDLLFNKVTLADAGFIKQYGDCLGDIAARDLICAQKFNGLTVLPPLLTDEMIAQYTSALLAGTITSGWTFGAGAALQIPFAMQMAYRFNGIGVTQNVLYENQKLIANQFNSAIGKIQDSLSSTASALGKLQDVVNQNAQALNTLVKQLSSNFGAISSVLNDILSRLDKVEAEVQIDRLITGRLQSLQTYVTQQLIRAAEIRASANLAATKMSECVLGQSKRVDFCGKGYHLMSFPQSAPHGVVFLHVTYVPAQEKNFTTAPAICHDGKAHFPREGVFVSNGTHWFVTQRNFYEPQIITTDNTFVSGNCDVVIGIVNNTVYDPLQPELDSFKEELDKYFKNHTSPDVDLGDISGINASVVNIQKEIDRLNEVAKNLNESLIDLQELGKYEQYIKWPWYIWLGFIAGLIAIVMVTIMLCCMTSCCSCLKGCCSCGSCCKARSTPITLSKDQLSGINNIAFSN

SEQ ID NO: 2 - protein, 1284 aa, Artificial Sequence
  Description of Artificial Sequence: Synthetic polypeptide
MFVFLVLLPLVSSQCVNLTTRTQLPPAYTNSFTRGVYYPDKVFRSSVLHSTQDLFLPFFSNVTWFHAIHVSGTNGTKRFDNPVLPFNDGVYFASTEKSNIIRGWIFGTTLDSKTQSLLIVNNATNVVIKVCEFQFCNDPFLGVYYHKNNKSWMESEFRVYSSANNCTFEYVSQPFLMDLEGKQGNFKNLREFVFKNIDGYFKIYSKHTPINLVRDLPQGFSALEPLVDLPIGINITRFQTLLALHRSYLTPGDSSSGWTAGAAAYYVGYLQPRTFLLKYNENGTITDAVDCALDPLSETKCTLKSFTVEKGIYQTSNFRVQPTESIVRFPNITNLCPFGEVFNATRFASVYAWNRKRISNCVADYSVLYNSASFSTFKCYGVSPTKLNDLCFTNVYADSFVIRGDEVRQIAPGQTGKIADYNYKLPDDFTGCVIAWNSNNLDSKVGGNYNYLYRLFRKSNLKPFERDISTEIYQAGSTPCNGVEGFNCYFPLQSYGFQPTNGVGYQPYRVVVLSFELLHAPATVCGPKKSTNLVKNKCVNFNFNGLTGTGVLTESNKKFLPFQQFGRDIADTTDAVRDPQTLEILDITPCSFGGVSVITPGTNTSNQVAVLYQDVNCTEVPVAIHADQLTPTWRVYSTGSNVFQTRAGCLIGAEHVNNSYECDIPIGAGICASYQTQTNSPRRARSVASQSIIAYTMSLGAENSVAYSNNSIAIPTNFTISVTTEILPVSMTKTSVDCTMYICGDSTECSNLLLQYGSFCTQLNRALTGIAVEQDKNTQEVFAQVKQIYKTPPIKDFGGFNFSQILPDPSKPSKRSFIEDLLFNKVTLADAGFIKQYGDCLGDIAARDLICAQKFNGLTVLPPLLTDEMIAQYTSALLAGTITSGWTFGAGAALQIPFAMQMAYRFNGIGVTQNVLYENQKLIANQFNSAIGKIQDSLSSTASALGKLQDVVNQNAQALNTLVKQLSSNFGAISSVLNDILSRLDKVEAEVQIDRLITGRLQSLQTYVTQQLIRAAEIRASANLAATKMSECVLGQSKRVDFCGKGYHLMSFPQSAPHGVVFLHVTYVPAQEKNFTTAPAICHDGKAHFPREGVFVSNGTHWFVTQRNFYEPQIITTDNTFVSGNCDVVIGIVNNTVYDPLQPELDSFKEELDKYFKNHTSPDVDLGDISGINASVVNIQKEIDRLNEVAKNLNESLIDLQELGKYEQYIKWPWYIWLGFIAGLIAIVMVTIMLCCMTSCCSCLKGCCSCGSCCKFDEDDKARSTPITLSKDQLSGINNIAFSN

SEQ ID NO: 3 - protein, 1290 aa, Artificial Sequence
  Description of Artificial Sequence: Synthetic polypeptide
MFVFLVLLPLVSSQCVNLTTRTQLPPAYTNSFTRGVYYPDKVFRSSVLHSTQDLFLPFFSNVTWFHAIHVSGTNGTKRFDNPVLPFNDGVYFASTEKSNIIRGWIFGTTLDSKTQSLLIVNNATNVVIKVCEFQFCNDPFLGVYYHKNNKSWMESEFRVYSSANNCTFEYVSQPFLMDLEGKQGNFKNLREFVFKNIDGYFKIYSKHTPINLVRDLPQGFSALEPLVDLPIGINITRFQTLLALHRSYLTPGDSSSGWTAGAAAYYVGYLQPRTFLLKYNENGTITDAVDCALDPLSETKCTLKSFTVEKGIYQTSNFRVQPTESIVRFPNITNLCPFGEVFNATRFASVYAWNRKRISNCVADYSVLYNSASFSTFKCYGVSPTKLNDLCFTNVYADSFVIRGDEVRQIAPGQTGKIADYNYKLPDDFTGCVIAWNSNNLDSKVGGNYNYLYRLFRKSNLKPFERDISTEIYQAGSTPCNGVEGFNCYFPLQSYGFQPTNGVGYQPYRVVVLSFELLHAPATVCGPKKSTNLVKNKCVNFNFNGLTGTGVLTESNKKFLPFQQFGRDIADTTDAVRDPQTLEILDITPCSFGGVSVITPGTNTSNQVAVLYQDVNCTEVPVAIHADQLTPTWRVYSTGSNVFQTRAGCLIGAEHVNNSYECDIPIGAGICASYQTQTNSPRRARSVASQSIIAYTMSLGAENSVAYSNNSIAIPTNFTISVTTEILPVSMTKTSVDCTMYICGDSTECSNLLLQYGSFCTQLNRALTGIAVEQDKNTQEVFAQVKQIYKTPPIKDFGGFNFSQILPDPSKPSKRSFIEDLLFNKVTLADAGFIKQYGDCLGDIAARDLICAQKFNGLTVLPPLLTDEMIAQYTSALLAGTITSGWTFGAGAALQIPFAMQMAYRFNGIGVTQNVLYENQKLIANQFNSAIGKIQDSLSSTASALGKLQDVVNQNAQALNTLVKQLSSNFGAISSVLNDILSRLDKVEAEVQIDRLITGRLQSLQTYVTQQLIRAAEIRASANLAATKMSECVLGQSKRVDFCGKGYHLMSFPQSAPHGVVFLHVTYVPAQEKNFTTAPAICHDGKAHFPREGVFVSNGTHWFVTQRNFYEPQIITTDNTFVSGNCDVVIGIVNNTVYDPLQPELDSFKEELDKYFKNHTSPDVDLGDISGINASVVNIQKEIDRLNEVAKNLNESLIDLQELGKYEQYIKWPWYIWLGFIAGLIAIVMVTIMLCCMTSCCSCLKGCCSCGSCCKFDEDDGLLLYCKARSTPITLSKDQLSGINNIAFSN

SEQ ID NO: 4 - protein, 1275 aa, Artificial Sequence
  Description of Artificial Sequence: Synthetic polypeptide
MFVFLVLLPLVSSQCVNLTTRTQLPPAYTNSFTRGVYYPDKVFRSSVLHSTQDLFLPFFSNVTWFHAIHVSGTNGTKRFDNPVLPFNDGVYFASTEKSNIIRGWIFGTTLDSKTQSLLIVNNATNVVIKVCEFQFCNDPFLGVYYHKNNKSWMESEFRVYSSANNCTFEYVSQPFLMDLEGKQGNFKNLREFVFKNIDGYFKIYSKHTPINLVRDLPQGFSALEPLVDLPIGINITRFQTLLALHRSYLTPGDSSSGWTAGAAAYYVGYLQPRTFLLKYNENGTITDAVDCALDPLSETKCTLKSFTVEKGIYQTSNFRVQPTESIVRFPNITNLCPFGEVFNATRFASVYAWNRKRISNCVADYSVLYNSASFSTFKCYGVSPTKLNDLCFTNVYADSFVIRGDEVRQIAPGQTGKIADYNYKLPDDFTGCVIAWNSNNLDSKVGGNYNYLYRLFRKSNLKPFERDISTEIYQAGSTPCNGVEGFNCYFPLQSYGFQPTNGVGYQPYRVVVLSFELLHAPATVCGPKKSTNLVKNKCVNFNFNGLTGTGVLTESNKKFLPFQQFGRDIADTTDAVRDPQTLEILDITPCSFGGVSVITPGTNTSNQVAVLYQDVNCTEVPVAIHADQLTPTWRVYSTGSNVFQTRAGCLIGAEHVNNSYECDIPIGAGICASYQTQTNSPRRARSVASQSIIAYTMSLGAENSVAYSNNSIAIPTNFTISVTTEILPVSMTKTSVDCTMYICGDSTECSNLLLQYGSFCTQLNRALTGIAVEQDKNTQEVFAQVKQIYKTPPIKDFGGFNFSQILPDPSKPSKRSFIEDLLFNKVTLADAGFIKQYGDCLGDIAARDLICAQKFNGLTVLPPLLTDEMIAQYTSALLAGTITSGWTFGAGAALQIPFAMQMAYRFNGIGVTQNVLYENQKLIANQFNSAIGKIQDSLSSTASALGKLQDVVNQNAQALNTLVKQLSSNFGAISSVLNDILSRLDKVEAEVQIDRLITGRLQSLQTYVTQQLIRAAEIRASANLAATKMSECVLGQSKRVDFCGKGYHLMSFPQSAPHGVVFLHVTYVPAQEKNFTTAPAICHDGKAHFPREGVFVSNGTHWFVTQRNFYEPQIITTDNTFVSGNCDVVIGIVNNTVYDPLQPELDSFKEELDKYFKNHTSPDVDLGDISGINASVVNIQKEIDRLNEVAKNLNESLIDLQELGKYEQYIKWPWYIWLGFIAGLIAIVMVTIMLCCMTSCCSCLKGLLLYCKARSTPITLSKDQLSGINNIAFSN

SEQ ID NO: 5 - protein, 1268 aa, Artificial Sequence
  Description of Artificial Sequence: Synthetic polypeptide
MFVFLVLLPLVSSQCVNLTTRTQLPPAYTNSFTRGVYYPDKVFRSSVLHSTQDLFLPFFSNVTWFHAIHVSGTNGTKRFDNPVLPFNDGVYFASTEKSNIIRGWIFGTTLDSKTQSLLIVNNATNVVIKVCEFQFCNDPFLGVYYHKNNKSWMESEFRVYSSANNCTFEYVSQPFLMDLEGKQGNFKNLREFVFKNIDGYFKIYSKHTPINLVRDLPQGFSALEPLVDLPIGINITRFQTLLALHRSYLTPGDSSSGWTAGAAAYYVGYLQPRTFLLKYNENGTITDAVDCALDPLSETKCTLKSFTVEKGIYQTSNFRVQPTESIVRFPNITNLCPFGEVFNATRFASVYAWNRKRISNCVADYSVLYNSASFSTFKCYGVSPTKLNDLCFTNVYADSFVIRGDEVRQIAPGQTGKIADYNYKLPDDFTGCVIAWNSNNLDSKVGGNYNYLYRLFRKSNLKPFERDISTEIYQAGSTPCNGVEGFNCYFPLQSYGFQPTNGVGYQPYRVVVLSFELLHAPATVCGPKKSTNLVKNKCVNFNFNGLTGTGVLTESNKKFLPFQQFGRDIADTTDAVRDPQTLEILDITPCSFGGVSVITPGTNTSNQVAVLYQDVNCTEVPVAIHADQLTPTWRVYSTGSNVFQTRAGCLIGAEHVNNSYECDIPIGAGICASYQTQTNSPRRARSVASQSIIAYTMSLGAENSVAYSNNSIAIPTNFTISVTTEILPVSMTKTSVDCTMYICGDSTECSNLLLQYGSFCTQLNRALTGIAVEQDKNTQEVFAQVKQIYKTPPIKDFGGFNFSQILPDPSKPSKRSFIEDLLFNKVTLADAGFIKQYGDCLGDIAARDLICAQKFNGLTVLPPLLTDEMIAQYTSALLAGTITSGWTFGAGAALQIPFAMQMAYRFNGIGVTQNVLYENQKLIANQFNSAIGKIQDSLSSTASALGKLQDVVNQNAQALNTLVKQLSSNFGAISSVLNDILSRLDKVEAEVQIDRLITGRLQSLQTYVTQQLIRAAEIRASANLAATKMSECVLGQSKRVDFCGKGYHLMSFPQSAPHGVVFLHVTYVPAQEKNFTTAPAICHDGKAHFPREGVFVSNGTHWFVTQRNFYEPQIITTDNTFVSGNCDVVIGIVNNTVYDPLQPELDSFKEELDKYFKNHTSPDVDLGDISGINASVVNIQKEIDRLNEVAKNLNESLIDLQELGKYEQYIKWPWYIWLGFIAGLIAIVMVTIMLCCMTSCCSCLKARSTPITLSKDQLSGINNIAFSN

SEQ ID NO: 6 - protein, 1271 aa, Artificial Sequence
  Description of Artificial Sequence: Synthetic polypeptide
MFVFLVLLPLVSSQCVNLTTRTQLPPAYTNSFTRGVYYPDKVFRSSVLHSTQDLFLPFFSNVTWFHAIHVSGTNGTKRFDNPVLPFNDGVYFASTEKSNIIRGWIFGTTLDSKTQSLLIVNNATNVVIKVCEFQFCNDPFLGVYYHKNNKSWMESEFRVYSSANNCTFEYVSQPFLMDLEGKQGNFKNLREFVFKNIDGYFKIYSKHTPINLVRDLPQGFSALEPLVDLPIGINITRFQTLLALHRSYLTPGDSSSGWTAGAAAYYVGYLQPRTFLLKYNENGTITDAVDCALDPLSETKCTLKSFTVEKGIYQTSNFRVQPTESIVRFPNITNLCPFGEVFNATRFASVYAWNRKRISNCVADYSVLYNSASFSTFKCYGVSPTKLNDLCFTNVYADSFVIRGDEVRQIAPGQTGKIADYNYKLPDDFTGCVIAWNSNNLDSKVGGNYNYLYRLFRKSNLKPFERDISTEIYQAGSTPCNGVEGFNCYFPLQSYGFQPTNGVGYQPYRVVVLSFELLHAPATVCGPKKSTNLVKNKCVNFNFNGLTGTGVLTESNKKFLPFQQFGRDIADTTDAVRDPQTLEILDITPCSFGGVSVITPGTNTSNQVAVLYQDVNCTEVPVAIHADQLTPTWRVYSTGSNVFQTRAGCLIGAEHVNNSYECDIPIGAGICASYQTQTNSPRRARSVASQSIIAYTMSLGAENSVAYSNNSIAIPTNFTISVTTEILPVSMTKTSVDCTMYICGDSTECSNLLLQYGSFCTQLNRALTGIAVEQDKNTQEVFAQVKQIYKTPPIKDFGGFNFSQILPDPSKPSKRSFIEDLLFNKVTLADAGFIKQYGDCLGDIAARDLICAQKFNGLTVLPPLLTDEMIAQYTSALLAGTITSGWTFGAGAALQIPFAMQMAYRFNGIGVTQNVLYENQKLIANQFNSAIGKIQDSLSSTASALGKLQDVVNQNAQALNTLVKQLSSNFGAISSVLNDILSRLDKVEAEVQIDRLITGRLQSLQTYVTQQLIRAAEIRASANLAATKMSECVLGQSKRVDFCGKGYHLMSFPQSAPHGVVFLHVTYVPAQEKNFTTAPAICHDGKAHFPREGVFVSNGTHWFVTQRNFYEPQIITTDNTFVSGNCDVVIGIVNNTVYDPLQPELDSFKEELDKYFKNHTSPDVDLGDISGINASVVNIQKEIDRLNEVAKNLNESLIDLQELGKYEQYIKWPWYIWLGFIAGLIAIVMVTIMLCCMTSCCSCLKYCKARSTPITLSKDQLSGINNIAFSN

SEQ ID NO: 7 - DNA, 3837 bp, Artificial Sequence
  Description of Artificial Sequence: Synthetic polynucleotide
atgtttgtttttcttgttttattgccactagtctctagtcagtgtgttaatcttacaaccagaactcaattaccccctgcatacactaattctttcacacgtggtgtttattaccctgacaaagttttcagatcctcagttttacattcaactcaggacttgttcttacctttcttttccaatgttacttggttccatgctatacatgtctctgggaccaatggtactaagaggtttgataaccctgtcctaccatttaatgatggtgtttattttgcttccactgagaagtctaacataataagaggctggatttttggtactactttagattcgaagacccagtccctacttattgttaataacgctactaatgttgttattaaagtctgtgaatttcaattttgtaatgatccatttttgggtgtttattaccacaaaaacaacaaaagttggatggaaagtgagttcagagtttattctagtgcgaataattgcacttttgaatatgtctctcagccttttcttatggaccttgaaggaaaacagggtaatttcaaaaatcttagggaatttgtgtttaagaatattgatggttattttaaaatatattctaagcacacgcctattaatttagtgcgtgatctccctcagggtttttcggctttagaaccattggtagatttgccaataggtattaacatcactaggtttcaaactttacttgctttacatagaagttatttgactcctggtgattcttcttcaggttggacagctggtgctgcagcttattatgtgggttatcttcaacctaggacttttctattaaaatataatgaaaatggaaccattacagatgctgtagactgtgcacttgaccctctctcagaaacaaagtgtacgttgaaatccttcactgtagaaaaaggaatctatcaaacttctaactttagagtccaaccaacagaatctattgttagatttcctaatattacaaacttgtgcccttttggtgaagtttttaacgccaccagatttgcatctgtttatgcttggaacaggaagagaatcagcaactgtgttgctgattattctgtcctatataattccgcatcattttccacttttaagtgttatggagtgtctcctactaaattaaatgatctctgctttactaatgtctatgcagattcatttgtaattagaggtgatgaagtcagacaaatcgctccagggcaaactggaaagattgctgattataattataaattaccagatgattttacaggctgcgttatagcttggaattctaacaatcttgattctaaggttggtggtaattataattacctgtatagattgtttaggaagtctaatctcaaaccttttgagagagatatttcaactgaaatctatcaggccggtagcacaccttgtaatggtgttgaaggttttaattgttactttcctttacaatcatatggtttccaacccactaatggtgttggttaccaaccatacagagtagtagtactttcttttgaacttctacatgcaccagcaactgtttgtggacctaaaaagtctactaatttggttaaaaacaaatgtgtcaatttcaacttcaatggtttaacaggcacaggtgttcttactgagtctaacaaaaagtttctgcctttccaacaatttggcagagacattgctgacactactgatgctgtccgtgatccacagacacttgagattcttgacattacaccatgttcttttggtggtgtcagtgttataacaccaggaacaaatacttctaaccaggttgctgttctttatcaggatgttaactgcacagaagtccctgttgctattcatgcagatcaacttactcctacttggcgtgtttattctacaggttctaatgtttttcaaacacgtgcaggctgtttaataggggctgaacatgtcaacaactcatatgagtgtgacatacccattggtgcaggtatatgcgctagttatcagactcagactaattctcctcggcgggcacgtagtgtagctagtcaatccatcattgcctacactatgtcacttggtgcagaaaattcagttgcttactctaataactctattgccatacccacaaattttactattagtgttaccacagaaattctaccagtgtctatgaccaagacatcagtagattgtacaatgtacatttgtggtgattcaactgaatgcagcaatcttttgttgcaatatggcagtttttgtacacaattaaaccgtgctttaactggaatagctgttgaacaagacaaaaacacccaagaagtttttgcacaagtcaaacaaatttacaaaacaccaccaattaaagattttggtggttttaatttttcacaaatattaccagatccatcaaaaccaagcaagaggtcatttattgaagatctacttttcaacaaagtgacacttgcagatgctggcttcatcaaacaatatggtgattgccttggtgatattgctgctagagacctcatttgtgcacaaaagtttaacggccttactgttttgccacctttgctcacagatgaaatgattgctcaatacacttctgcactgttagcgggtacaatcacttctggttggacctttggtgcaggtgctgcattacaaataccatttgctatgcaaatggcttataggtttaatggtattggagttacacagaatgttctctatgagaaccaaaaattgattgccaaccaatttaatagtgctattggcaaaattcaagactcactttcttccacagcaagtgcacttggaaaacttcaagatgtggtcaaccaaaatgcacaagctttaaacacgcttgttaaacaacttagctccaattttggtgcaatttcaagtgttttaaatgatatcctttcacgtcttgacaaagttgaggctgaagtgcaaattgataggttgatcacaggcagacttcaaagtttgcagacatatgtgactcaacaattaattagagctgcagaaatcagagcttctgctaatcttgctgctactaaaatgtcagagtgtgtacttggacaatcaaaaagagttgatttttgtggaaagggctatcatcttatgtccttccctcagtcagcacctcatggtgtagtcttcttgcatgtgacttatgtccctgcacaagaaaagaacttcacaactgctcctgccatttgtcatgatggaaaagcacactttcctcgtgaaggtgtctttgtttcaaatggcacacactggtttgtaacacaaaggaatttttatgaaccacaaatcattactacagacaacacatttgtgtctggtaactgtgatgttgtaataggaattgtcaacaacacagtttatgatcctttgcaacctgaattagactcattcaaggaggagttagataaatattttaagaatcatacatcaccagatgttgatttaggtgacatctctggcattaatgcttcagttgtaaacattcaaaaagaaattgaccgcctcaatgaggttgccaagaatttaaatgaatctctcatcgatctccaagaacttggaaagtatgagcagtatataaaatggccatggtacatttggctaggttttatagctggcttgattgccatagtaatggtgacaattatgctttgctgtatgaccagttgctgtagttgtctcaagggctgttgttcttgtggatcctgctgcaaggccagaagcacaccaatcacactaagcaaggatcaactgagtggtataaataatattgcatttagtaactaa

SEQ ID NO: 8 - DNA, 3855 bp, Artificial Sequence
  Description of Artificial Sequence: Synthetic polynucleotide
atgtttgtttttcttgttttattgccactagtctctagtcagtgtgttaatcttacaaccagaactcaattaccccctgcatacactaattctttcacacgtggtgtttattaccctgacaaagttttcagatcctcagttttacattcaactcaggacttgttcttacctttcttttccaatgttacttggttccatgctatacatgtctctgggaccaatggtactaagaggtttgataaccctgtcctaccatttaatgatggtgtttattttgcttccactgagaagtctaacataataagaggctggatttttggtactactttagattcgaagacccagtccctacttattgttaataacgctactaatgttgttattaaagtctgtgaatttcaattttgtaatgatccatttttgggtgtttattaccacaaaaacaacaaaagttggatggaaagtgagttcagagtttattctagtgcgaataattgcacttttgaatatgtctctcagccttttcttatggaccttgaaggaaaacagggtaatttcaaaaatcttagggaatttgtgtttaagaatattgatggttattttaaaatatattctaagcacacgcctattaatttagtgcgtgatctccctcagggtttttcggctttagaaccattggtagatttgccaataggtattaacatcactaggtttcaaactttacttgctttacatagaagttatttgactcctggtgattcttcttcaggttggacagctggtgctgcagcttattatgtgggttatcttcaacctaggacttttctattaaaatataatgaaaatggaaccattacagatgctgtagactgtgcacttgaccctctctcagaaacaaagtgtacgttgaaatccttcactgtagaaaaaggaatctatcaaacttctaactttagagtccaaccaacagaatctattgttagatttcctaatattacaaacttgtgcccttttggtgaagtttttaacgccaccagatttgcatctgtttatgcttggaacaggaagagaatcagcaactgtgttgctgattattctgtcctatataattccgcatcattttccacttttaagtgttatggagtgtctcctactaaattaaatgatctctgctttactaatgtctatgcagattcatttgtaattagaggtgatgaagtcagacaaatcgctccagggcaaactggaaagattgctgattataattataaattaccagatgattttacaggctgcgttatagcttggaattctaacaatcttgattctaaggttggtggtaattataattacctgtatagattgtttaggaagtctaatctcaaaccttttgagagagatatttcaactgaaatctatcaggccggtagcacaccttgtaatggtgttgaaggttttaattgttactttcctttacaatcatatggtttccaacccactaatggtgttggttaccaaccatacagagtagtagtactttcttttgaacttctacatgcaccagcaactgtttgtggacctaaaaagtctactaatttggttaaaaacaaatgtgtcaatttcaacttcaatggtttaacaggcacaggtgttcttactgagtctaacaaaaagtttctgcctttccaacaatttggcagagacattgctgacactactgatgctgtccgtgatccacagacacttgagattcttgacattacaccatgttcttttggtggtgtcagtgttataacaccaggaacaaatacttctaaccaggttgctgttctttatcaggatgttaactgcacagaagtccctgttgctattcatgcagatcaacttactcctacttggcgtgtttattctacaggttctaatgtttttcaaacacgtgcaggctgtttaataggggctgaacatgtcaacaactcatatgagtgtgacatacccattggtgcaggtatatgcgctagttatcagactcagactaattctcctcggcgggcacgtagtgtagctagtcaatccatcattgcctacactatgtcacttggtgcagaaaattcagttgcttactctaataactctattgccatacccacaaattttactattagtgttaccacagaaattctaccagtgtctatgaccaagacatcagtagattgtacaatgtacatttgtggtgattcaactgaatgcagcaatcttttgttgcaatatggcagtttttgtacacaattaaaccgtgctttaactggaatagctgttgaacaagacaaaaacacccaagaagtttttgcacaagtcaaacaaatttacaaaacaccaccaattaaagattttggtggttttaatttttcacaaatattaccagatccatcaaaaccaagcaagaggtcatttattgaagatctacttttcaacaaagtgacacttgcagatgctggcttcatcaaacaatatggtgattgccttggtgatattgctgctagagacctcatttgtgcacaaaagtttaacggccttactgttttgccacctttgctcacagatgaaatgattgctcaatacacttctgcactgttagcgggtacaatcacttctggttggacctttggtgcaggtgctgcattacaaataccatttgctatgcaaatggcttataggtttaatggtattggagttacacagaatgttctctatgagaaccaaaaattgattgccaaccaatttaatagtgctattggcaaaattcaagactcactttcttccacagcaagtgcacttggaaaacttcaagatgtggtcaaccaaaatgcacaagctttaaacacgcttgttaaacaacttagctccaattttggtgcaatttcaagtgttttaaatgatatcctttcacgtcttgacaaagttgaggctgaagtgcaaattgataggttgatcacaggcagacttcaaagtttgcagacatatgtgactcaacaattaattagagctgcagaaatcagagcttctgctaatcttgctgctactaaaatgtcagagtgtgtacttggacaatcaaaaagagttgatttttgtggaaagggctatcatcttatgtccttccctcagtcagcacctcatggtgtagtcttcttgcatgtgacttatgtccctgcacaagaaaagaacttcacaactgctcctgccatttgtcatgatggaaaagcacactttcctcgtgaaggtgtctttgtttcaaatggcacacactggtttgtaacacaaaggaatttttatgaaccacaaatcattactacagacaacacatttgtgtctggtaactgtgatgttgtaataggaattgtcaacaacacagtttatgatcctttgcaacctgaattagactcattcaaggaggagttagataaatattttaagaatcatacatcaccagatgttgatttaggtgacatctctggcattaatgcttcagttgtaaacattcaaaaagaaattgaccgcctcaatgaggttgccaagaatttaaatgaatctctcatcgatctccaagaacttggaaagtatgagcagtatataaaatggccatggtacatttggctaggttttatagctggcttgattgccatagtaatggtgacaattatgctttgctgtatgaccagttgctgtagttgtctcaagggctgttgttcttgtggatcctgctgcaaatttgatgaagacgacaaggccagaagcacaccaatcacactaagcaaggatcaactgagtggtataaataatattgcatttagtaactaa

SEQ ID NO: 9 - DNA, 3873 bp, Artificial Sequence
  Description of Artificial Sequence: Synthetic polynucleotide
atgtttgtttttcttgttttattgccactagtctctagtcagtgtgttaatcttacaaccagaactcaattaccccctgcatacactaattctttcacacgtggtgtttattaccctgacaaagttttcagatcctcagttttacattcaactcaggacttgttcttacctttcttttccaatgttacttggttccatgctatacatgtctctgggaccaatggtactaagaggtttgataaccctgtcctaccatttaatgatggtgtttattttgcttccactgagaagtctaacataataagaggctggatttttggtactactttagattcgaagacccagtccctacttattgttaataacgctactaatgttgttattaaagtctgtgaatttcaattttgtaatgatccatttttgggtgtttattaccacaaaaacaacaaaagttggatggaaagtgagttcagagtttattctagtgcgaataattgcacttttgaatatgtctctcagccttttcttatggaccttgaaggaaaacagggtaatttcaaaaatcttagggaatttgtgtttaagaatattgatggttattttaaaatatattctaagcacacgcctattaatttagtgcgtgatctccctcagggtttttcggctttagaaccattggtagatttgccaataggtattaacatcactaggtttcaaactttacttgctttacatagaagttatttgactcctggtgattcttcttcaggttggacagctggtgctgcagcttattatgtgggttatcttcaacctaggacttttctattaaaatataatgaaaatggaaccattacagatgctgtagactgtgcacttgaccctctctcagaaacaaagtgtacgttgaaatccttcactgtagaaaaaggaatctatcaaacttctaactttagagtccaaccaacagaatctattgttagatttcctaatattacaaacttgtgcccttttggtgaagtttttaacgccaccagatttgcatctgtttatgcttggaacaggaagagaatcagcaactgtgttgctgattattctgtcctatataattccgcatcattttccacttttaagtgttatggagtgtctcctactaaattaaatgatctctgctttactaatgtctatgcagattcatttgtaattagaggtgatgaagtcagacaaatcgctccagggcaaactggaaagattgctgattataattataaattaccagatgattttacaggctgcgttatagcttggaattctaacaatcttgattctaaggttggtggtaattataattacctgtatagattgtttaggaagtctaatctcaaaccttttgagagagatatttcaactgaaatctatcaggccggtagcacaccttgtaatggtgttgaaggttttaattgttactttcctttacaatcatatggtttccaacccactaatggtgttggttaccaaccatacagagtagtagtactttcttttgaacttctacatgcaccagcaactgtttgtggacctaaaaagtctactaatttggttaaaaacaaatgtgtcaatttcaacttcaatggtttaacaggcacaggtgttcttactgagtctaacaaaaagtttctgcctttccaacaatttggcagagacattgctgacactactgatgctgtccgtgatccacagacacttgagattcttgacattacaccatgttcttttggtggtgtcagtgttataacaccaggaacaaatacttctaaccaggttgctgttctttatcaggatgttaactgcacagaagtccctgttgctattcatgcagatcaacttactcctacttggcgtgtttattctacaggttctaatgtttttcaaacacgtgcaggctgtttaataggggctgaacatgtcaacaactcatatgagtgtgacatacccattggtgcaggtatatgcgctagttatcagactcagactaattctcctcggcgggcacgtagtgtagctagtcaatccatcattgcctacactatgtcacttggtgcagaaaattcagttgcttactctaataactctattgccatacccacaaattttactattagtgttaccacagaaattctaccagtgtctatgaccaagacatcagtagattgtacaatgtacatttgtggtgattcaactgaatgcagcaatcttttgttgcaatatggcagtttttgtacacaattaaaccgtgctttaactggaatagctgttgaacaagacaaaaacacccaagaagtttttgcacaagtcaaacaaatttacaaaacaccaccaattaaagattttggtggttttaatttttcacaaatattaccagatccatcaaaaccaagcaagaggtcatttattgaagatctacttttcaacaaagtgacacttgcagatgctggcttcatcaaacaatatggtgattgccttggtgatattgctgctagagacctcatttgtgcacaaaagtttaacggccttactgttttgccacctttgctcacagatgaaatgattgctcaatacacttctgcactgttagcgggtacaatcacttctggttggacctttggtgcaggtgctgcattacaaataccatttgctatgcaaatggcttataggtttaatggtattggagttacacagaatgttctctatgagaaccaaaaattgattgccaaccaatttaatagtgctattggcaaaattcaagactcactttcttccacagcaagtgcacttggaaaacttcaagatgtggtcaaccaaaatgcacaagctttaaacacgcttgttaaacaacttagctccaattttggtgcaatttcaagtgttttaaatgatatcctttcacgtcttgacaaagttgaggctgaagtgcaaattgataggttgatcacaggcagacttcaaagtttgcagacatatgtgactcaacaattaattagagctgcagaaatcagagcttctgctaatcttgctgctactaaaatgtcagagtgtgtacttggacaatcaaaaagagttgatttttgtggaaagggctatcatcttatgtccttccctcagtcagcacctcatggtgtagtcttcttgcatgtgacttatgtccctgcacaagaaaagaacttcacaactgctcctgccatttgtcatgatggaaaagcacactttcctcgtgaaggtgtctttgtttcaaatggcacacactggtttgtaacacaaaggaatttttatgaaccacaaatcattactacagacaacacatttgtgtctggtaactgtgatgttgtaataggaattgtcaacaacacagtttatgatcctttgcaacctgaattagactcattcaaggaggagttagataaatattttaagaatcatacatcaccagatgttgatttaggtgacatctctggcattaatgcttcagttgtaaacattcaaaaagaaattgaccgcctcaatgaggttgccaagaatttaaatgaatctctcatcgatctccaagaacttggaaagtatgagcagtatataaaatggccatggtacatttggctaggttttatagctggcttgattgccatagtaatggtgacaattatgctttgctgtatgaccagttgctgtagttgtctcaagggctgttgttcttgtggatcctgctgcaaatttgatgaagacgacggactgctcctatactgtaaggccagaagcacaccaatcacactaagcaaggatcaactgagtggtataaataatattgcatttagtaactaa

SEQ ID NO: 10 - DNA, 3828 bp, Artificial Sequence
  Description of Artificial Sequence: Synthetic polynucleotide
atgtttgtttttcttgttttattgccactagtctctagtcagtgtgttaatcttacaaccagaactcaattaccccctgcatacactaattctttcacacgtggtgtttattaccctgacaaagttttcagatcctcagttttacattcaactcaggacttgttcttacctttcttttccaatgttacttggttccatgctatacatgtctctgggaccaatggtactaagaggtttgataaccctgtcctaccatttaatgatggtgtttattttgcttccactgagaagtctaacataataagaggctggatttttggtactactttagattcgaagacccagtccctacttattgttaataacgctactaatgttgttattaaagtctgtgaatttcaattttgtaatgatccatttttgggtgtttattaccacaaaaacaacaaaagttggatggaaagtgagttcagagtttattctagtgcgaataattgcacttttgaatatgtctctcagccttttcttatggaccttgaaggaaaacagggtaatttcaaaaatcttagggaatttgtgtttaagaatattgatggttattttaaaatatattctaagcacacgcctattaatttagtgcgtgatctccctcagggtttttcggctttagaaccattggtagatttgccaataggtattaacatcactaggtttcaaactttacttgctttacatagaagttatttgactcctggtgattcttcttcaggttggacagctggtgctgcagcttattatgtgggttatcttcaacctaggacttttctattaaaatataatgaaaatggaaccattacagatgctgtagactgtgcacttgaccctctctcagaaacaaagtgtacgttgaaatccttcactgtagaaaaaggaatctatcaaacttctaactttagagtccaaccaacagaatctattgttagatttcctaatattacaaacttgtgcccttttggtgaagtttttaacgccaccagatttgcatctgtttatgcttggaacaggaagagaatcagcaactgtgttgctgattattctgtcctatataattccgcatcattttccacttttaagtgttatggagtgtctcctactaaattaaatgatctctgctttactaatgtctatgcagattcatttgtaattagaggtgatgaagtcagacaaatcgctccagggcaaactggaaagattgctgattataattataaattaccagatgattttacaggctgcgttatagcttggaattctaacaatcttgattctaaggttggtggtaattataattacctgtatagattgtttaggaagtctaatctcaaaccttttgagagagatatttcaactgaaatctatcaggccggtagcacaccttgtaatggtgttgaaggttttaattgttactttcctttacaatcatatggtttccaacccactaatggtgttggttaccaaccatacagagtagtagtactttcttttgaacttctacatgcaccagcaactgtttgtggacctaaaaagtctactaatttggttaaaaacaaatgtgtcaatttcaacttcaatggtttaacaggcacaggtgttcttactgagtctaacaaaaagtttctgcctttccaacaatttggcagagacattgctgacactactgatgctgtccgtgatccacagacacttgagattcttgacattacaccatgttcttttggtggtgtcagtgttataacaccaggaacaaatacttctaaccaggttgctgttctttatcaggatgttaactgcacagaagtccctgttgctattcatgcagatcaacttactcctacttggcgtgtttattctacaggttctaatgtttttcaaacacgtgcaggctgtttaataggggctgaacatgtcaacaactcatatgagtgtgacatacccattggtgcaggtatatgcgctagttatcagactcagactaattctcctcggcgggcacgtagtgtagctagtcaatccatcattgcctacactatgtcacttggtgcagaaaattcagttgcttactctaataactctattgccatacccacaaattttactattagtgttaccacagaaattctaccagtgtctatgaccaagacatcagtagattgtacaatgtacatttgtggtgattcaactgaatgcagcaatcttttgttgcaatatggcagtttttgtacacaattaaaccgtgctttaactggaatagctgttgaacaagacaaaaacacccaagaagtttttgcacaagtcaaacaaatttacaaaacaccaccaattaaagattttggtggttttaatttttcacaaatattaccagatccatcaaaaccaagcaagaggtcatttattgaagatctacttttcaacaaagtgacacttgcagatgctggcttcatcaaacaatatggtgattgccttggtgatattgctgctagagacctcatttgtgcacaaaagtttaacggccttactgttttgccacctttgctcacagatgaaatgattgctcaatacacttctgcactgttagcgggtacaatcacttctggttggacctttggtgcaggtgctgcattacaaataccatttgctatgcaaatggcttataggtttaatggtattggagttacacagaatgttctctatgagaaccaaaaattgattgccaaccaatttaatagtgctattggcaaaattcaagactcactttcttccacagcaagtgcacttggaaaacttcaagatgtggtcaaccaaaatgcacaagctttaaacacgcttgttaaacaacttagctccaattttggtgcaatttcaagtgttttaaatgatatcctttcacgtcttgacaaagttgaggctgaagtgcaaattgataggttgatcacaggcagacttcaaagtttgcagacatatgtgactcaacaattaattagagctgcagaaatcagagcttctgctaatcttgctgctactaaaatgtcagagtgtgtacttggacaatcaaaaagagttgatttttgtggaaagggctatcatcttatgtccttccctcagtcagcacctcatggtgtagtcttcttgcatgtgacttatgtccctgcacaagaaaagaacttcacaactgctcctgccatttgtcatgatggaaaagcacactttcctcgtgaaggtgtctttgtttcaaatggcacacactggtttgtaacacaaaggaatttttatgaaccacaaatcattactacagacaacacatttgtgtctggtaactgtgatgttgtaataggaattgtcaacaacacagtttatgatcctttgcaacctgaattagactcattcaaggaggagttagataaatattttaagaatcatacatcaccagatgttgatttaggtgacatctctggcattaatgcttcagttgtaaacattcaaaaagaaattgaccgcctcaatgaggttgccaagaatttaaatgaatctctcatcgatctccaagaacttggaaagtatgagcagtatataaaatggccatggtacatttggctaggttttatagctggcttgattgccatagtaatggtgacaattatgctttgctgtatgaccagttgctgtagttgtctcaagggactgctcctatactgtaaggccagaagcacaccaatcacactaagcaaggatcaactgagtggtataaataatattgcatttagtaactaa

SEQ ID NO: 11 - DNA, 3807 bp, Artificial Sequence
  Description of Artificial Sequence: Synthetic polynucleotide
atgtttgtttttcttgttttattgccactagtctctagtcagtgtgttaatcttacaaccagaactcaattaccccctgcatacactaattctttcacacgtggtgtttattaccctgacaaagttttcagatcctcagttttacattcaactcaggacttgttcttacctttcttttccaatgttacttggttccatgctatacatgtctctgggaccaatggtactaagaggtttgataaccctgtcctaccatttaatgatggtgtttattttgcttccactgagaagtctaacataataagaggctggatttttggtactactttagattcgaagacccagtccctacttattgttaataacgctactaatgttgttattaaagtctgtgaatttcaattttgtaatgatccatttttgggtgtttattaccacaaaaacaacaaaagttggatggaaagtgagttcagagtttattctagtgcgaataattgcacttttgaatatgtctctcagccttttcttatggaccttgaaggaaaacagggtaatttcaaaaatcttagggaatttgtgtttaagaatattgatggttattttaaaatatattctaagcacacgcctattaatttagtgcgtgatctccctcagggtttttcggctttagaaccattggtagatttgccaataggtattaacatcactaggtttcaaactttacttgctttacatagaagttatttgactcctggtgattcttcttcaggttggacagctggtgctgcagcttattatgtgggttatcttcaacctaggacttttctattaaaatataatgaaaatggaaccattacagatgctgtagactgtgcacttgaccctctctcagaaacaaagtgtacgttgaaatccttcactgtagaaaaaggaatctatcaaacttctaactttagagtccaaccaacagaatctattgttagatttcctaatattacaaacttgtgcccttttggtgaagtttttaacgccaccagatttgcatctgtttatgcttggaacaggaagagaatcagcaactgtgttgctgattattctgtcctatataattccgcatcattttccacttttaagtgttatggagtgtctcctactaaattaaatgatctctgctttactaatgtctatgcagattcatttgtaattagaggtgatgaagtcagacaaatcgctccagggcaaactggaaagattgctgattataattataaattaccagatgattttacaggctgcgttatagcttggaattctaacaatcttgattctaaggttggtggtaattataattacctgtatagattgtttaggaagtctaatctcaaaccttttgagagagatatttcaactgaaatctatcaggccggtagcacaccttgtaatggtgttgaaggttttaattgttactttcctttacaatcatatggtttccaacccactaatggtgttggttaccaaccatacagagtagtagtactttcttttgaacttctacatgcaccagcaactgtttgtggacctaaaaagtctactaatttggttaaaaacaaatgtgtcaatttcaacttcaatggtttaacaggcacaggtgttcttactgagtctaacaaaaagtttctgcctttccaacaatttggcagagacattgctgacactactgatgctgtccgtgatccacagacacttgagattcttgacattacaccatgttcttttggtggtgtcagtgttataacaccaggaacaaatacttctaaccaggttgctgttctttatcaggatgttaactgcacagaagtccctgttgctattcatgcagatcaacttactcctacttggcgtgtttattctacaggttctaatgtttttcaaacacgtgcaggctgtttaataggggctgaacatgtcaacaactcatatgagtgtgacatacccattggtgcaggtatatgcgctagttatcagactcagactaattctcctcggcgggcacgtagtgtagctagtcaatccatcattgcctacactatgtcacttggtgcagaaaattcagttgcttactctaataactctattgccatacccacaaattttactattagtgttaccacagaaattctaccagtgtctatgaccaagacatcagtagattgtacaatgtacatttgtggtgattcaactgaatgcagcaatcttttgttgcaatatggcagtttttgtacacaattaaaccgtgctttaactggaatagctgttgaacaagacaaaaacacccaagaagtttttgcacaagtcaaacaaatttacaaaacaccaccaattaaagattttggtggttttaatttttcacaaatattaccagatccatcaaaaccaagcaagaggtcatttattgaagatctacttttcaacaaagtgacacttgcagatgctggcttcatcaaacaatatggtgattgccttggtgatattgctgctagagacctcatttgtgcacaaaagtttaacggccttactgttttgccacctttgctcacagatgaaatgattgctcaatacacttctgcactgttagcgggtacaatcacttctggttggacctttggtgcaggtgctgcattacaaataccatttgctatgcaaatggcttataggtttaatggtattggagttacacagaatgttctctatgagaaccaaaaattgattgccaaccaatttaatagtgctattggcaaaattcaagactcactttcttccacagcaagtgcacttggaaaacttcaagatgtggtcaaccaaaatgcacaagctttaaacacgcttgttaaacaacttagctccaattttggtgcaatttcaagtgttttaaatgatatcctttcacgtcttgacaaagttgaggctgaagtgcaaattgataggttgatcacaggcagacttcaaagtttgcagacatatgtgactcaacaattaattagagctgcagaaatcagagcttctgctaatcttgctgctactaaaatgtcagagtgtgtacttggacaatcaaaaagagttgatttttgtggaaagggctatcatcttatgtccttccctcagtcagcacctcatggtgtagtcttcttgcatgtgacttatgtccctgcacaagaaaagaacttcacaactgctcctgccatttgtcatgatggaaaagcacactttcctcgtgaaggtgtctttgtttcaaatggcacacactggtttgtaacacaaaggaatttttatgaaccacaaatcattactacagacaacacatttgtgtctggtaactgtgatgttgtaataggaattgtcaacaacacagtttatgatcctttgcaacctgaattagactcattcaaggaggagttagataaatattttaagaatcatacatcaccagatgttgatttaggtgacatctctggcattaatgcttcagttgtaaacattcaaaaagaaattgaccgcctcaatgaggttgccaagaatttaaatgaatctctcatcgatctccaagaacttggaaagtatgagcagtatataaaatggccatggtacatttggctaggttttatagctggcttgattgccatagtaatggtgacaattatgctttgctgtatgaccagttgctgtagttgtctcaaggccagaagcacaccaatcacactaagcaaggatcaactgagtggtataaataatattgcatttagtaactaa

SEQ ID NO: 12 - DNA, 3816 bp, Artificial Sequence
  Description of Artificial Sequence: Synthetic polynucleotide
atgtttgtttttcttgttttattgccactagtctctagtcagtgtgttaatcttacaaccagaactcaattaccccctgcatacactaattctttcacacgtggtgtttattaccctgacaaagttttcagatcctcagttttacattcaactcaggacttgttcttacctttcttttccaatgttacttggttccatgctatacatgtctctgggaccaatggtactaagaggtttgataaccctgtcctaccatttaatgatggtgtttattttgcttccactgagaagtctaacataataagaggctggatttttggtactactttagattcgaagacccagtccctacttattgttaataacgctactaatgttgttattaaagtctgtgaatttcaattttgtaatgatccatttttgggtgtttattaccacaaaaacaacaaaagttggatggaaagtgagttcagagtttattctagtgcgaataattgcacttttgaatatgtctctcagccttttcttatggaccttgaaggaaaacagggtaatttcaaaaatcttagggaatttgtgtttaagaatattgatggttattttaaaatatattctaagcacacgcctattaatttagtgcgtgatctccctcagggtttttcggctttagaaccattggtagatttgccaataggtattaacatcactaggtttcaaactttacttgctttacatagaagttatttgactcctggtgattcttcttcaggttggacagctggtgctgcagcttattatgtgggttatcttcaacctaggacttttctattaaaatataatgaaaatggaaccattacagatgctgtagactgtgcacttgaccctctctcagaaacaaagtgtacgttgaaatccttcactgtagaaaaaggaatctatcaaacttctaactttagagtccaaccaacagaatctattgttagatttcctaatattacaaacttgtgcccttttggtgaagtttttaacgccaccagatttgcatctgtttatgcttggaacaggaagagaatcagcaactgtgttgctgattattctgtcctatataattccgcatcattttccacttttaagtgttatggagtgtctcctactaaattaaatgatctctgctttactaatgtctatgcagattcatttgtaattagaggtgatgaagtcagacaaatcgctccagggcaaactggaaagattgctgattataattataaattaccagatgattttacaggctgcgttatagcttggaattctaacaatcttgattctaaggttggtggtaattataattacctgtatagattgtttaggaagtctaatctcaaaccttttgagagagatatttcaactgaaatctatcaggccggtagcacaccttgtaatggtgttgaaggttttaattgttactttcctttacaatcatatggtttccaacccactaatggtgttggttaccaaccatacagagtagtagtactttcttttgaacttctacatgcaccagcaactgtttgtggacctaaaaagtctactaatttggttaaaaacaaatgtgtcaatttcaacttcaatggtttaacaggcacaggtgttcttactgagtctaacaaaaagtttctgcctttccaacaatttggcagagacattgctgacactactgatgctgtccgtgatccacagacacttgagattcttgacattacaccatgttcttttggtggtgtcagtgttataacaccaggaacaaatacttctaaccaggttgctgttctttatcaggatgttaactgcacagaagtccctgttgctattcatgcagatcaacttactcctacttggcgtgtttattctacaggttctaatgtttttcaaacacgtgcaggctgtttaataggggctgaacatgtcaacaactcatatgagtgtgacatacccattggtgcaggtatatgcgctagttatcagactcagactaattctcctcggcgggcacgtagtgtagctagtcaatccatcattgcctacactatgtcacttggtgcagaaaattcagttgcttactctaataactctattgccatacccacaaattttactattagtgttaccacagaaattctaccagtgtctatgaccaagacatcagtagattgtacaatgtacatttgtggtgattcaactgaatgcagcaatcttttgttgcaatatggcagtttttgtacacaattaaaccgtgctttaactggaatagctgttgaacaagacaaaaacacccaagaagtttttgcacaagtcaaacaaatttacaaaacaccaccaattaaagattttggtggttttaatttttcacaaatattaccagatccatcaaaaccaagcaagaggtcatttattgaagatctacttttcaacaaagtgacacttgcagatgctggcttcatcaaacaatatggtgattgccttggtgatattgctgctagagacctcatttgtgcacaaaagtttaacggccttactgttttgccacctttgctcacagatgaaatgattgctcaatacacttctgcactgttagcgggtacaatcacttctggttggacctttggtgcaggtgctgcattacaaataccatttgctatgcaaatggcttataggtttaatggtattggagttacacagaatgttctctatgagaaccaaaaattgattgccaaccaatttaatagtgctattggcaaaattcaagactcactttcttccacagcaagtgcacttggaaaacttcaagatgtggtcaaccaaaatgcacaagctttaaacacgcttgttaaacaacttagctccaattttggtgcaatttcaagtgttttaaatgatatcctttcacgtcttgacaaagttgaggctgaagtgcaaattgataggttgatcacaggcagacttcaaagtttgcagacatatgtgactcaacaattaattagagctgcagaaatcagagcttctgctaatcttgctgctactaaaatgtcagagtgtgtacttggacaatcaaaaagagttgatttttgtggaaagggctatcatcttatgtccttccctcagtcagcacctcatggtgtagtcttcttgcatgtgacttatgtccctgcacaagaaaagaacttcacaactgctcctgccatttgtcatgatggaaaagcacactttcctcgtgaaggtgtctttgtttcaaatggcacacactggtttgtaacacaaaggaatttttatgaaccacaaatcattactacagacaacacatttgtgtctggtaactgtgatgttgtaataggaattgtcaacaacacagtttatgatcctttgcaacctgaattagactcattcaaggaggagttagataaatattttaagaatcatacatcaccagatgttgatttaggtgacatctctggcattaatgcttcagttgtaaacattcaaaaagaaattgaccgcctcaatgaggttgccaagaatttaaatgaatctctcatcgatctccaagaacttggaaagtatgagcagtatataaaatggccatggtacatttggctaggttttatagctggcttgattgccatagtaatggtgacaattatgctttgctgtatgaccagttgctgtagttgtctcaagtactgtaaggccagaagcacaccaatcacactaagcaaggatcaactgagtggtataaataatattgcatttagtaactaa

SEQ ID NO: 13 - DNA, 15917 bp, Artificial Sequence
  Description of Artificial Sequence: Synthetic polynucleotide
acgcgaaaaaatgcgtacaacaaacttgcataaaccaaaaaaatggggcaaataagaatttgataagtaccacttaaatttaactcccttgcttagcgatgggttcgaattcgctatcgatgataaaagtacgtctacaaaatctatttgataatgatgaagtagcgctactaaaaataacgtgttatacggataaactaatacatctaacgaatgcgctagcgaaagcggtaatacatacgataaaactaaatggtatagtatttgtacatgtaataacgtcgtcggatatatgtccgaataataatatagtagtaaaatcgaattttacgacgatgccggtactacaaaatggtggttatatatgggaaatgatggaactaacgcattgttcgcaaccgaatggtctactagatgataattgtgaaataaaattttcgaaaaaactatcggattcgacgatgacgaattatatgaatcaactatcggaactactaggttttgatctaaatccgtaaattataattaatatcaactagcaaatcaatgtcactaacaccattagttaatataaaacttaacagaagacaaaaatggggcaaataaatcaattcagccaacccaaccatggatacgacgcataatgataatacgccgcaacgtctaatgataacggatatgcgtccgctatcgctagaaacgataataacgtcgctaacgcgtgatataataacgcataaatttatatatctaataaatcatgaatgtatagtacgtaaactagatgaacgtcaagcgacgtttacgtttctagtaaattatgaaatgaaactactacataaagtaggttcgacgaaatataaaaaatatacggaatataatacgaaatatggtacgtttccgatgccgatatttataaatcatgatggttttctagaatgtataggtataaaaccgacgaaacatacgccgataatatataaatatgatctaaatccgtaaatttcaacacaatattcacacaatctaaaacaacaactctatgcataactatactccatagtccagatggagcctgaaaattatagtaatttaaaattaaggagagatataagatagaagatggggcaaatacaaagatggctcttagcaaagtcaagttgaatgatacactcaacaaagatcaacttctgtcatccagcaaatacaccatccaacggagcacaggagatagtattgatactcctaattatgatgtgcagaaacacatcaataagttatgtggcatgttattaatcacagaagatgctaatcataaattcactgggttaataggtatgttatatgcgatgtctaggttaggaagagaagacaccataaaaatactcagagatgcgggatatcatgtaaaagcaaatggagtagatgtaacaacacatcgtcaagacattaatggaaaagaaatgaaatttgaagtgttaacattggcaagcttaacaactgaaattcaaatcaacattgagatagaatctagaaaatcctacaaaaaaatgctaaaagaaatgggagaggtagctccagaatacaggcatgactctcctgattgtgggatgataatattatgtatagcagcattagtaataactaaattagcagcaggggacagatctggtcttacagccgtgattaggagagctaataatgtcctaaaaaatgaaatgaaacgttacaaaggcttactacccaaggacatagccaacagcttctatgaagtgtttgaaaaacatccccactttatagatgtttttgttcattttggtatagcacaatcttctaccagaggtggcagtagagttgaagggatttttgcaggattgtttatgaatgcctatggtgcagggcaagtgatgttacggtggggagtcttagcaaaatcagttaaaaatattatgttaggacatgctagtgtgcaagcagaaatggaacaagttgttgaggtttatgaatatgcccaaaaattgggtggtgaagcaggattctaccatatattgaacaacccaaaagcatcattattatctttgactcaatttcctcacttctccagtgtagtattaggcaatgctgctggcctaggcataatgggagagtacagaggtacaccgaggaatcaagatctatatgatgcagcaaaggcatatgctgaacaactcaaagaaaatggtgtgattaactacagtgtactagacttgacagcagaagaactagaggctatcaaacatcagcttaatccaaaagataatgatgtagagctttgagttaataaaaaatggggcaaataaatcatcatggaaaagtttgctcctgaattccatggagaagatgcaaacaacagggctactaaattcctagaatcaataaagggcaaattcacatcacccaaagatcccaagaaaaaagatagtatcatatctgtcaactcaatagatatagaagtaaccaaagaaagccctataacatcaaattcaactattatcaacccaacaaatgagacagatgatactgcagggaacaagcccaattatcaaagaaaacctctagtaagtttcaaagaagaccctacaccaagtgataatcccttttctaaactatacaaagaaaccatagaaacatttgataacaatgaagaagaatccagctattcatacgaagaaataaatgatcagacaaacgataatataacagcaagattagataggattgatgaaaaattaagtgaaatactaggaatgcttcacacattagtagtggcaagtgcaggacctacatctgctcgggatggtataagagatgccatgattggtttaagagaagaaatgatagaaaaaatcagaactgaagcattaatgaccaatgacagattagaagctatggcaagactcaggaatgaggaaagtgaaaagatggcaaaagacacatcagatgaagtgtctctcaatccaacatcagagaaattgaacaacctattggaagggaatgatagtgacaatgatctatcacttgaagatttctgattagttaccactcttcacatcaacacacaataccaacagaagaccaacaaactaaccaacccaatcatccaaccaaacatccatccgccaatcagccaaacagccaacaaaacaaccagccaatccaaaactaaccacccggaaaaaatctataatatagttacaaaaaaaggaaagggtggggcaaatatggaaacatacgtgaacaagcttcacgaaggctccacatacacagctgctgttcaatacaatgtcttagaaaaagacgatgaccctgcatcacttacaatatgggtgcccatgttccaatcatctatgccagcagatttacttataaaagaactagctaatgtcaacatactagtgaaacaaatatccacacccaagggaccttcactaagagtcatgataaactcaagaagtgcagtgctagcacaaatgcccagcaaatttaccatatgcgctaatgtgtccttggatgaaagaagcaaactagcatatgatgtaaccacaccctgtgaaatcaaggcatgtagtctaacatgcctaaaatcaaaaaatatgttgactacagttaaagatctcactatgaagacactcaaccctacacatgatattattgctttatgtgaatttgaaaacatagtaacatcaaaaaaagtcataataccaacatacctaagatccatcagtgtcagaaataaagatctgaacacacttgaaaatataacaaccactgaattcaaaaatgctatcacaaatgcaaaaatcatcccttactcaggattactattagtcatcacagtgactgacaacaaaggagcattcaaatacataaagccacaaagtcaattcatagtagatcttggagcttacctagaaaaagaaagtatatattatgttaccacaaattggaagcacacagctacacgatttgcaatcaaacccatggaagattaacctttttcctctacatcagtgtgttaattcatacaaactttctacctacattcttcacttcaccatcacaatcacaaacactctgtggttcaaccaatcaaacaaaacttatctgaagtcccagatcatcccaagtcattgtttatcagatctagtactcaaataagttaataaaaaatatacacatggacgtccatggggcaaatgcaaacatgtttgtttttcttgttttattgccactagtctctagtcagtgtgttaatcttacaaccagaactcaattaccccctgcatacactaattctttcacacgtggtgtttattaccctgacaaagttttcagatcctcagttttacattcaactcaggacttgttcttacctttcttttccaatgttacttggttccatgctatacatgtctctgggaccaatggtactaagaggtttgataaccctgtcctaccatttaatgatggtgtttattttgcttccactgagaagtctaacataataagaggctggatttttggtactactttagattcgaagacccagtccctacttattgttaataacgctactaatgttgttattaaagtctgtgaatttcaattttgtaatgatccatttttgggtgtttattaccacaaaaacaacaaaagttggatggaaagtgagttcagagtttattctagtgcgaataattgcacttttgaatatgtctctcagccttttcttatggaccttgaaggaaaacagggtaatttcaaaaatcttagggaatttgtgtttaagaatattgatggttattttaaaatatattctaagcacacgcctattaatttagtgcgtgatctccctcagggtttttcggctttagaaccattggtagatttgccaataggtattaacatcactaggtttcaaactttacttgctttacatagaagttatttgactcctggtgattcttcttcaggttggacagctggtgctgcagcttattatgtgggttatcttcaacctaggacttttctattaaaatataatgaaaatggaaccattacagatgctgtagactgtgcacttgaccctctctcagaaacaaagtgtacgttgaaatccttcactgtagaaaaaggaatctatcaaacttctaactttagagtccaaccaacagaatctattgttagatttcctaatattacaaacttgtgcccttttggtgaagtttttaacgccaccagatttgcatctgtttatgcttggaacaggaagagaatcagcaactgtgttgctgattattctgtcctatataattccgcatcattttccacttttaagtgttatggagtgtctcctactaaattaaatgatctctgctttactaatgtctatgcagattcatttgtaattagaggtgatgaagtcagacaaatcgctccagggcaaactggaaagattgctgattataattataaattaccagatgattttacaggctgcgttatagcttggaattctaacaatcttgattctaaggttggtggtaattataattacctgtatagattgtttaggaagtctaatctcaaaccttttgagagagatatttcaactgaaatctatcaggccggtagcacaccttgtaatggtgttgaaggttttaattgttactttcctttacaatcatatggtttccaacccactaatggtgttggttaccaaccatacagagtagtagtactttcttttgaacttctacatgcaccagcaactgtttgtggacctaaaaagtctactaatttggttaaaaacaaatgtgtcaatttcaacttcaatggtttaacaggcacaggtgttcttactgagtctaacaaaaagtttctgcctttccaacaatttggcagagacattgctgacactactgatgctgtccgtgatccacagacacttgagattcttgacattacaccatgttcttttggtggtgtcagtgttataacaccaggaacaaatacttctaaccaggttgctgttctttatcaggatgttaactgcacagaagtccctgttgctattcatgcagatcaacttactcctacttggcgtgtttattctacaggttctaatgtttttcaaacacgtgcaggctgtttaataggggctgaacatgtcaacaactcatatgagtgtgacatacccattggtgcaggtatatgcgctagttatcagactcagactaattctcctcggcgggcacgtagtgtagctagtcaatccatcattgcctacactatgtcacttggtgcagaaaattcagttgcttactctaataactctattgccatacccacaaattttactattagtgttaccacagaaattctaccagtgtctatgaccaagacatcagtagattgtacaatgtacatttgtggtgattcaactgaatgcagcaatcttttgttgcaatatggcagtttttgtacacaattaaaccgtgctttaactggaatagctgttgaacaagacaaaaacacccaagaagtttttgcacaagtcaaacaaatttacaaaacaccaccaattaaagattttggtggttttaatttttcacaaatattaccagatccatcaaaaccaagcaagaggtcatttattgaagatctacttttcaacaaagtgacacttgcagatgctggcttcatcaaacaatatggtgattgccttggtgatattgctgctagagacctcatttgtgcacaaaagtttaacggccttactgttttgccacctttgctcacagatgaaatgattgctcaatacacttctgcactgttagcgggtacaatcacttctggttggacctttggtgcaggtgctgcattacaaataccatttgctatgcaaatggcttataggtttaatggtattggagttacacagaatgttctctatgagaaccaaaaattgattgccaaccaatttaatagtgctattggcaaaattcaagactcactttcttccacagcaagtgcacttggaaaacttcaagatgtggtcaaccaaaatgcacaagctttaaacacgcttgttaaacaacttagctccaattttggtgcaatttcaagtgttttaaatgatatcctttcacgtcttgacaaagttgaggctgaagtgcaaattgataggttgatcacaggcagacttcaaagtttgcagacatatgtgactcaacaattaattagagctgcagaaatcagagcttctgctaatcttgctgctactaaaatgtcagagtgtgtacttggacaatcaaaaagagttgatttttgtggaaagggctatcatcttatgtccttccctcagtcagcacctcatggtgtagtcttcttgcatgtgacttatgtccctgcacaagaaaagaacttcacaactgctcctgccatttgtcatgatggaaaagcacactttcctcgtgaaggtgtctttgtttcaaatggcacacactggtttgtaacacaaaggaatttttatgaaccacaaatcattactacagacaacacatttgtgtctggtaactgtgatgttgtaataggaattgtcaacaacacagtttatgatcctttgcaacctgaattagactcattcaaggaggagttagataaatattttaagaatcatacatcaccagatgttgatttaggtgacatctctggcattaatgcttcagttgtaaacattcaaaaagaaattgaccgcctcaatgaggttgccaagaatttaaatgaatctctcatcgatctccaagaacttggaaagtatgagcagtatataaaatggccatggtacatttggctaggttttatagctggcttgattgccatagtaatggtgacaattatgctttgctgtatgaccagttgctgtagttgtctcaagggctgttgttcttgtggatcctgctgcaaggccagaagcacaccaatcacactaagcaaggatcaactgagtggtataaataatattgcatttagtaactaaataaaaatagcacctaatcatgttcttacaatggtttactatctgctcatagacaacccatctatcattggattttcttaaaatctgaacttcatcgaaactcttatctataaaccatctcacttacactatttaagtagattcctagtttatagttatataaaacacaattgaatgccagtcgaccttaccatctgtaaaaatgaaaactggggcaaatatgtcacgaaggaatccttgcaaatttgaaattcgaggtcattgcttaaatggtaagaggtgtcattttagtcataattattttgaatggccaccccatgcactgcttgtaagacaaaactttatgttaaacagaatacttaagtctatggataaaagtatagataccttatcagaaataagtggagctgcagagttggacagaacagaagagtatgctcttggtgtagttggagtgctagagagttatataggatcaataaacaatataactaaacaatcagcatgtgttgccatgagcaaactcctcactgaactcaatagtgatgatatcaaaaagctgagggacaatgaagagctaaattcacccaagataagagtgtacaatactgtcatatcatatattgaaagcaacaggaaaaacaataaacaaactatccatctgttaaaaagattgccagcagacgtattgaagaaaaccatcaaaaacacattggatatccataagagcataaccatcaacaacccaaaagaatcaactgttagtgatacaaatgaccatgccaaaaataatgatactacctgacaaatatccttgtagtataacttccatactaataacaagtagatgtagagttactatgtataatcaaaagaacacactatatttcaatcaaaacaacccaaataaccatatgtactcaccgaatcaaacattcaatgaaatccattggacctctcaagaattgattgacacaattcaaaattttctacaacatctaggtattattgaggatatatatacaatatatatattagtgtcataacactcaattctaacactcaccacatcgttacattattaattcaaacaattcaagttgtgggacaaaatggatcccattattaatggaaattctgctaatgtttatctaaccgatagttatttaaaaggtgttatctctttctcagagtgtaatgctttaggaagttacatattcaatggtccttatctcaaaaatgattataccaacttaattagtagacaaaatccattaatagaacacatgaatctaaagaaactaaatataacacagtccttaatatctaagtatcataaaggtgaaataaaattagaagaacctacttattttcagtcattacttatgacatacaagagtatgacctcgtcagaacagattgctaccactaatttacttaaaaagataataagaagagctatagaaataagtgatgtcaaagtctatgctatattgaataaactagggcttaaagaaaaggacaagattaaatccaacaatggacaagatgaagacaactcagttattacgaccataatcaaagatgatatactttcagctgttaaagataatcaatctcatcttaaagcagacaaaaatcactctacaaaacaaaaagacacaatcaaaacaacactcttgaagaaattgatgtgttcaatgcaacatcctccatcatggttaatacattggtttaacttatacacaaaattaaacaacatattaacacagtatcgatcaaatgaggtaaaaaaccatgggtttacattgatagataatcaaactcttagtggatttcaatttattttgaaccaatatggttgtatagtttatcataaggaactcaaaagaattactgtgacaacctataatcaattcttgacatggaaagatattagccttagtagattaaatgtttgtttaattacatggattagtaactgcttgaacacattaaataaaagcttaggcttaagatgcggattcaataatgttatcttgacacaactattcctttatggagattgtatactaaagctatttcacaatgaggggttctacataataaaagaggtagagggatttattatgtctctaattttaaatataacagaagaagatcaattcagaaaacgattttataatagtatgctcaacaacatcacagatgctgctaataaagctcagaaaaatctgctatcaagagtatgtcatacattattagataagacagtgtccgataatataataaatggcagatggataattctattaagtaagttccttaaattaattaagcttgcaggtgacaataaccttaacaatctgagtgaactatattttttgttcagaatatttggacacccaatggtagatgaaagacaagccatggatgctgttaaaattaattgcaatgagaccaaattttacttgttaagcagtctgagtatgttaagaggtgcctttatatatagaattataaaagggtttgtaaataattacaacagatggcctactttaagaaatgctattgttttacccttaagatggttaacttactataaactaaacacttatccttctttgttggaacttacagaaagagatttgattgtgttatcaggactacgtttctatcgtgagtttcggttgcctaaaaaagtggatcttgaaatgattataaatgataaagctatatcacctcctaaaaatttgatatggactagtttccctagaaattacatgccatcacacatacaaaactatatagaacatgaaaaattaaaattttccgagagtgataaatcaagaagagtattagagtattatttaagagataacaaattcaatgaatgtgatttatacaactgtgtagttaatcaaagttatctcaacaaccctaatcatgtggtatcattgacaggcaaagaaagagaactcagtgtaggtagaatgtttgcaatgcaaccgggaatgttcagacaggttcaaatattggcagagaaaatgatagctgaaaacattttacaattctttcctgaaagtcttacaagatatggtgatctagaactacaaaaaatattagaattgaaagcaggaataagtaacaaatcaaatcgctacaatgataattacaacaattacattagtaagtgctctatcatcacagatctcagcaaattcaatcaagcatttcgatatgaaacgtcatgtatttgtagtgatgtgctggatgaactgcatggtgtacaatctctattttcctggttacatttaactattcctcatgtcacaataatatgcacatataggcatgcacccccctatataggagatcatattgtagatcttaacaatgtagatgaacaaagtggattatatagatatcacatgggtggcatcgaagggtggtgtcaaaaactgtggaccatagaagctatatcactattggatctaatatctctcaaagggaaattctcaattactgctttaattaatggtgacaatcaatcaatagatataagcaaaccaatcagactcatggaaggtcaaactcatgctcaagcagattatttgctagcattaaatagccttaaattactgtataaagagtatgcaggcataggccacaaattaaaaggaactgagacttatatatcacgagatatgcaatttatgagtaaaacaattcaacataacggtgtatattacccagctagtataaagaaagtcctaagagtgggaccgtggataaacactatacttgatgatttcaaagtgagtctagaatctataggtagtttgacacaagaattagaatatagaggtgaaagtctattatgcagtttaatatttagaaatgtatggttatataatcagattgctctacaattaaaaaatcatgcattatgtaacaataaactatatttggacatattaaaggttctgaaacacttaaaaaccttttttaatcttgataatattgatacagcattaacattgtatatgaatttacccatgttatttggtggtggtgatcccaacttgttatatcgaagtttctatagaagaactcctgacttcctcacagaggctatagttcactctgtgttcatacttagttattatacaaaccatgacttaaaagataaacttcaagatctgtcagatgatagattgaataagttcttaacatgcataatcacgtttgacaaaaaccctaatgctgaattcgtaacattgatgagagatcctcaagctttagggtctgagagacaagctaaaattactagcgaaatcaatagactggcagttacagaggttttgagtacagctccaaacaaaatattctccaaaagtgcacaacattatactactacagagatagatctaaatgatattatgcaaaatatagaacctacatatcctcatgggctaagagttgtttatgaaagtttacccttttataaagcagagaaaatagtaaatcttatatcaggtacaaaatctataactaacatactggaaaaaacttctgccatagacttaacagatattgatagagccactgagatgatgaggaaaaacataactttgcttataaggatacttccattggattgtaacagagataaaagagagatattgagtatggaaaacctaagtattactgaattaagcaaatatgttagggaaagatcttggtctttatccaatatagttggtgttacatcacccagtatcatgtatacaatggacatcaaatatactacaagcactatatctagtggcataattatagagaaatataatgttaacagtttaacacgtggtgagagaggacccactaaaccatgggttggttcatctacacaagagaaaaaaacaatgccagtttataatagacaagtcttaaccaaaaaacagagagatcaaatagatctattagcaaaattggattgggtgtatgcatctatagataacaaggatgaattcatggaagaactcagcataggaacccttgggttaacatatgaaaaggccaagaaattatttccacaatatttaagtgtcaattatttgcatcgccttacagtcagtagtagaccatgtgaattccctgcatcaataccagcttatagaacaacaaattatcactttgacactagccctattaatcgcatattaacagaaaagtatggtgatgaagatattgacatagtattccaaaactgtataagctttggccttagtttaatgtcagtagtagaacaatttactaatgtatgtcctaacagaattattctcatacctaagcttaatgagatacatttgatgaaacctcccatattcacaggtgatgttgatattcacaagttaaaacaagtgatacaaaaacagcatatgtttttaccagacaaaataagtttgactcaatatgtggaattattcttaagtaataaaacactcaaatctggatctcatgttaattctaatttaatattggcacataaaatatctgactattttcataatacttacattttaagtactaatttagctggacattggattctgattatacaacttatgaaagattctaaaggtatttttgaaaaagattggggagagggatatataactgatcatatgtttattaatttgaaagttttcttcaatgcttataagacctatctcttgtgttttcataaaggttatggcaaagcaaagctggagtgtgatatgaacacttcagatcttctatgtgtattggaattaatagacagtagttattggaagtctatgtctaaggtatttttagaacaaaaagttatcaaatacattcttagccaagatgcaagtttacatagagtaaaaggatgtcatagcttcaaattatggtttcttaaacgtcttaatgtagcagaattcacagtttgcccttgggttgttaacatagattatcatccaacacatatgaaagcaatattaacttatatagatcttgttagaatgggattgataaatatagatagaatacacattaaaaataaacacaaattcaatgatgaattttatacttctaatctcttctacattaattataacttctcagataatactcatctattaactaaacatataaggattgctaattctgaattagaaaataattacaacaaattatatcatcctacaccagaaaccctagagaatatactagccaatccgattaaaagtaatgacaaaaagacactgaatgactattgtataggtaaaaatgttgactcaataatgttaccattgttatctaataagaagcttattaaatcgtctgcaatgattagaaccaattacagcaaacaagatttgtataatttattccctatggttgtgattgatagaattatagatcattcaggcaatacagccaaatccaaccaactttacactactacttcccaccaaatatctttagtgcacaatagcacatcactttactgcatgcttccttggcatcatattaatagattcaattttgtatttagttctacaggttgtaaaattagtatagagtatattttaaaagatcttaaaattaaagatcccaattgtatagcattcataggtgaaggagcagggaatttattattgcgtacagtagtggaacttcatcctgacataagatatatttacagaagtctgaaagattgcaatgatcatagtttacctattgagtttttaaggctgtacaatggacatatcaacattgattatggtgaaaatttgaccattcctgctacagatgcaaccaacaacattcattggtcttatttacatataaagtttgctgaacctatcagtctttttgtctgtgatgccgaattgtctgtaacagtcaactggagtaaaattataatagaatggagcaagcatgtaagaaagtgcaagtactgttcctcagttaataaatgtatgttaatagtaaaatatcatgctcaagatgatattgatttcaaattagacaatataactatattaaaaacttatgtatgcttaggcagtaagttaaagggatcggaggtttacttagtccttacaataggtcctgcgaatatattcccagtatttaatgtagtacaaaatgctaaattgatactatcaagaaccaaaaatttcatcatgcctaagaaagctgataaagagtctattgatgcaaatattaaaagtttgataccctttctttgttaccctataacaaaaaaaggaattaatactgcattgtcaaaactaaagagtgttgttagtggagatatactatcatattctatagctggacgtaatgaagttttcagcaataaacttataaatcataagcatatgaacatcttaaaatggttcaatcatgttttaaatttcagatcaacagaactaaactataaccatttatatatggtagaatctacatatccttacctaagtgaattgttaaacagcttgacaaccaatgaacttaaaaaactgattaaaatcacaggtagtctgttatacaactttcataatgaataatgaataaagatcttataataaaaattcccatagctatacactaacactgtattcaattatagttattaaaaattaaaaatcgtacgattttttaaataacttttagtgaactaatcctaaagttatcattttaatcttggaggaataaatttaaaccctaatctaattggtttatatgtgtattaactaaattacgagatattagtttttgacactttttttctcgt

SEQ ID NO: 14 - DNA, 15935 bp, Artificial Sequence
  Description of Artificial Sequence: Synthetic polynucleotide
acgcgaaaaaatgcgtacaacaaacttgcataaaccaaaaaaatggggcaaataagaatttgataagtaccacttaaatttaactcccttgcttagcgatgggttcgaattcgctatcgatgataaaagtacgtctacaaaatctatttgataatgatgaagtagcgctactaaaaataacgtgttatacggataaactaatacatctaacgaatgcgctagcgaaagcggtaatacatacgataaaactaaatggtatagtatttgtacatgtaataacgtcgtcggatatatgtccgaataataatatagtagtaaaatcgaattttacgacgatgccggtactacaaaatggtggttatatatgggaaatgatggaactaacgcattgttcgcaaccgaatggtctactagatgataattgtgaaataaaattttcgaaaaaactatcggattcgacgatgacgaattatatgaatcaactatcggaactactaggttttgatctaaatccgtaaattataattaatatcaactagcaaatcaatgtcactaacaccattagttaatataaaacttaacagaagacaaaaatggggcaaataaatcaattcagccaacccaaccatggatacgacgcataatgataatacgccgcaacgtctaatgataacggatatgcgtccgctatcgctagaaacgataataacgtcgctaacgcgtgatataataacgcataaatttatatatctaataaatcatgaatgtatagtacgtaaactagatgaacgtcaagcgacgtttacgtttctagtaaattatgaaatgaaactactacataaagtaggttcgacgaaatataaaaaatatacggaatataatacgaaatatggtacgtttccgatgccgatatttataaatcatgatggttttctagaatgtataggtataaaaccgacgaaacatacgccgataatatataaatatgatctaaatccgtaaatttcaacacaatattcacacaatctaaaacaacaactctatgcataactatactccatagtccagatggagcctgaaaattatagtaatttaaaattaaggagagatataagatagaagatggggcaaatacaaagatggctcttagcaaagtcaagttgaatgatacactcaacaaagatcaacttctgtcatccagcaaatacaccatccaacggagcacaggagatagtattgatactcctaattatgatgtgcagaaacacatcaataagttatgtggcatgttattaatcacagaagatgctaatcataaattcactgggttaataggtatgttatatgcgatgtctaggttaggaagagaagacaccataaaaatactcagagatgcgggatatcatgtaaaagcaaatggagtagatgtaacaacacatcgtcaagacattaatggaaaagaaatgaaatttgaagtgttaacattggcaagcttaacaactgaaattcaaatcaacattgagatagaatctagaaaatcctacaaaaaaatgctaaaagaaatgggagaggtagctccagaatacaggcatgactctcctgattgtgggatgataatattatgtatagcagcattagtaataactaaattagcagcaggggacagatctggtcttacagccgtgattaggagagctaataatgtcctaaaaaatgaaatgaaacgttacaaaggcttactacccaaggacatagccaacagcttctatgaagtgtttgaaaaacatccccactttatagatgtttttgttcattttggtatagcacaatcttctaccagaggtggcagtagagttgaagggatttttgcaggattgtttatgaatgcctatggtgcagggcaagtgatgttacggtggggagtcttagcaaaatcagttaaaaatattatgttaggacatgctagtgtgcaagcagaaatggaacaagttgttgaggtttatgaatatgcccaaaaattgggtggtgaagcaggattctaccatatattgaacaacccaaaagcatcattattatctttgactcaatttcctcacttctccagtgtagtattaggcaatgctgctggcctaggcataatgggagagtacagaggtacaccgaggaatcaagatctatatgatgcagcaaaggcatatgctgaacaactcaaagaaaatggtgtgattaactacagtgtactagacttgacagcagaagaactagaggctatcaaacatcagcttaatccaaaagataatgatgtagagctttgagttaataaaaaatggggcaaataaatcatcatggaaaagtttgctcctgaattccatggagaagatgcaaacaacagggctactaaattcctagaatcaataaagggcaaattcacatcacccaaagatcccaagaaaaaagatagtatcatatctgtcaactcaatagatatagaagtaaccaaagaaagccctataacatcaaattcaactattatcaacccaacaaatgagacagatgatactgcagggaacaagcccaattatcaaagaaaacctctagtaagtttcaaagaagaccctacaccaagtgataatcccttttctaaactatacaaagaaaccatagaaacatttgataacaatgaagaagaatccagctattcatacgaagaaataaatgatcagacaaacgataatataacagcaagattagataggattgatgaaaaattaagtgaaatactaggaatgcttcacacattagtagtggcaagtgcaggacctacatctgctcgggatggtataagagatgccatgattggtttaagagaagaaatgatagaaaaaatcagaactgaagcattaatgaccaatgacagattagaagctatggcaagactcaggaatgaggaaagtgaaaagatggcaaaagacacatcagatgaagtgtctctcaatccaacatcagagaaattgaacaacctattggaagggaatgatagtgacaatgatctatcacttgaagatttctgattagttaccactcttcacatcaacacacaataccaacagaagaccaacaaactaaccaacccaatcatccaaccaaacatccatccgccaatcagccaaacagccaacaaaacaaccagccaatccaaaactaaccacccggaaaaaatctataatatagttacaaaaaaaggaaagggtggggcaaatatggaaacatacgtgaacaagcttcacgaaggctccacatacacagctgctgttcaatacaatgtcttagaaaaagacgatgaccctgcatcacttacaatatgggtgcccatgttccaatcatctatgccagcagatttacttataaaagaactagctaatgtcaacatactagtgaaacaaatatccacacccaagggaccttcactaagagtcatgataaactcaagaagtgcagtgctagcacaaatgcccagcaaatttaccatatgcgctaatgtgtccttggatgaaagaagcaaactagcatatgatgtaaccacaccctgtgaaatcaaggcatgtagtctaacatgcctaaaatcaaaaaatatgttgactacagttaaagatctcactatgaagacactcaaccctacacatgatattattgctttatgtgaatttgaaaacatagtaacatcaaaaaaagtcataataccaacatacctaagatccatcagtgtcagaaataaagatctgaacacacttgaaaatataacaaccactgaattcaaaaatgctatcacaaatgcaaaaatcatcccttactcaggattactattagtcatcacagtgactgacaacaaaggagcattcaaatacataaagccacaaagtcaattcatagtagatcttggagcttacctagaaaaagaaagtatatattatgttaccacaaattggaagcacacagctacacgatttgcaatcaaacccatggaagattaacctttttcctctacatcagtgtgttaattcatacaaactttctacctacattcttcacttcaccatcacaatcacaaacactctgtggttcaaccaatcaaacaaaacttatctgaagtcccagatcatcccaagtcattgtttatcagatctagtactcaaataagttaataaaaaatatacacatggacgtccatggggcaaatgcaaacatgtttgtttttcttgttttattgccactagtctctagtcagtgtgttaatcttacaaccagaactcaattaccccctgcatacactaattctttcacacgtggtgtttattaccctgacaaagttttcagatcctcagttttacattcaactcaggacttgttcttacctttcttttccaatgttacttggttccatgctatacatgtctctgggaccaatggtactaagaggtttgataaccctgtcctaccatttaatgatggtgtttattttgcttccactgagaagtctaacataataagaggctggatttttggtactactttagattcgaagacccagtccctacttattgttaataacgctactaatgttgttattaaagtctgtgaatttcaattttgtaatgatccatttttgggtgtttattaccacaaaaacaacaaaagttggatggaaagtgagttcagagtttattctagtgcgaataattgcacttttgaatatgtctctcagccttttcttatggaccttgaaggaaaacagggtaatttcaaaaatcttagggaatttgtgtttaagaatattgatggttattttaaaatatattctaagcacacgcctattaatttagtgcgtgatctccctcagggtttttcggctttagaaccattggtagatttgccaataggtattaacatcactaggtttcaaactttacttgctttacatagaagttatttgactcctggtgattcttcttcaggttggacagctggtgctgcagcttattatgtgggttatcttcaacctaggacttttctattaaaatataatgaaaatggaaccattacagatgctgtagactgtgcacttgaccctctctcagaaacaaagtgtacgttgaaatccttcactgtagaaaaaggaatctatcaaacttctaactttagagtccaaccaacagaatctattgttagatttcctaatattacaaacttgtgcccttttggtgaagtttttaacgccaccagatttgcatctgtttatgcttggaacaggaagagaatcagcaactgtgttgctgattattctgtcctatataattccgcatcattttccacttttaagtgttatggagtgtctcctactaaattaaatgatctctgctttactaatgtctatgcagattcatttgtaattagaggtgatgaagtcagacaaatcgctccagggcaaactggaaagattgctgattataattataaattaccagatgattttacaggctgcgttatagcttggaattctaacaatcttgattctaaggttggtggtaattataattacctgtatagattgtttaggaagtctaatctcaaaccttttgagagagatatttcaactgaaatctatcaggccggtagcacaccttgtaatggtgttgaaggttttaattgttactttcctttacaatcatatggtttccaacccactaatggtgttggttaccaaccatacagagtagtagtactttcttttgaacttctacatgcaccagcaactgtttgtggacctaaaaagtctactaatttggttaaaaacaaatgtgtcaatttcaacttcaatggtttaacaggcacaggtgttcttactgagtctaacaaaaagtttctgcctttccaacaatttggcagagacattgctgacactactgatgctgtccgtgatccacagacacttgagattcttgacattacaccatgttcttttggtggtgtcagtgttataacaccaggaacaaatacttctaaccaggttgctgttctttatcaggatgttaactgcacagaagtccctgttgctattcatgcagatcaacttactcctacttggcgtgtttattctacaggttctaatgtttttcaaacacgtgcaggctgtttaataggggctgaacatgtcaacaactcatatgagtgtgacatacccattggtgcaggtatatgcgctagttatcagactcagactaattctcctcggcgggcacgtagtgtagctagtcaatccatcattgcctacactatgtcacttggtgcagaaaattcagttgcttactctaataactctattgccatacccacaaattttactattagtgttaccacagaaattctaccagtgtctatgaccaagacatcagtagattgtacaatgtacatttgtggtgattcaactgaatgcagcaatcttttgttgcaatatggcagtttttgtacacaattaaaccgtgctttaactggaatagctgttgaacaagacaaaaacacccaagaagtttttgcacaagtcaaacaaatttacaaaacaccaccaattaaagattttggtggttttaatttttcacaaatattaccagatccatcaaaaccaagcaagaggtcatttattgaagatctacttttcaacaaagtgacacttgcagatgctggcttcatcaaacaatatggtgattgccttggtgatattgctgctagagacctcatttgtgcacaaaagtttaacggccttactgttttgccacctttgctcacagatgaaatgattgctcaatacacttctgcactgttagcgggtacaatcacttctggttggacctttggtgcaggtgctgcattacaaataccatttgctatgcaaatggcttataggtttaatggtattggagttacacagaatgttctctatgagaaccaaaaattgattgccaaccaatttaatagtgctattggcaaaattcaagactcactttcttccacagcaagtgcacttggaaaacttcaagatgtggtcaaccaaaatgcacaagctttaaacacgcttgttaaacaacttagctccaattttggtgcaatttcaagtgttttaaatgatatcctttcacgtcttgacaaagttgaggctgaagtgcaaattgataggttgatcacaggcagacttcaaagtttgcagacatatgtgactcaacaattaattagagctgcagaaatcagagcttctgctaatcttgctgctactaaaatgtcagagtgtgtacttggacaatcaaaaagagttgatttttgtggaaagggctatcatcttatgtccttccctcagtcagcacctcatggtgtagtcttcttgcatgtgacttatgtccctgcacaagaaaagaacttcacaactgctcctgccatttgtcatgatggaaaagcacactttcctcgtgaaggtgtctttgtttcaaatggcacacactggtttgtaacacaaaggaatttttatgaaccacaaatcattactacagacaacacatttgtgtctggtaactgtgatgttgtaataggaattgtcaacaacacagtttatgatcctttgcaacctgaattagactcattcaaggaggagttagataaatattttaagaatcatacatcaccagatgttgatttaggtgacatctctggcattaatgcttcagttgtaaacattcaaaaagaaattgaccgcctcaatgaggttgccaagaatttaaatgaatctctcatcgatctccaagaacttggaaagtatgagcagtatataaaatggccatggtacatttggctaggttttatagctggcttgattgccatagtaatggtgacaattatgctttgctgtatgaccagttgctgtagttgtctcaagggctgttgttcttgtggatcctgctgcaaatttgatgaagacgacaaggccagaagcacaccaatcacactaagcaaggatcaactgagtggtataaataatattgcatttagtaactaaataaaaatagcacctaatcatgttcttacaatggtttactatctgctcatagacaacccatctatcattggattttcttaaaatctgaacttcatcgaaactcttatctataaaccatctcacttacactatttaagtagattcctagtttatagttatataaaacacaattgaatgccagtcgaccttaccatctgtaaaaatgaaaactggggcaaatatgtcacgaaggaatccttgcaaatttgaaattcgaggtcattgcttaaatggtaagaggtgtcattttagtcataattattttgaatggccaccccatgcactgcttgtaagacaaaactttatgttaaacagaatacttaagtctatggataaaagtatagataccttatcagaaataagtggagctgcagagttggacagaacagaagagtatgctcttggtgtagttggagtgctagagagttatataggatcaataaacaatataactaaacaatcagcatgtgttgccatgagcaaactcctcactgaactcaatagtgatgatatcaaaaagctgagggacaatgaagagctaaattcacccaagataagagtgtacaatactgtcatatcatatattgaaagcaacaggaaaaacaataaacaaactatccatctgttaaaaagattgccagcagacgtattgaagaaaaccatcaaaaacacattggatatccataagagcataaccatcaacaacccaaaagaatcaactgttagtgatacaaatgaccatgccaaaaataatgatactacctgacaaatatccttgtagtataacttccatactaataacaagtagatgtagagttactatgtataatcaaaagaacacactatatttcaatcaaaacaacccaaataaccatatgtactcaccgaatcaaacattcaatgaaatccattggacctctcaagaattgattgacacaattcaaaattttctacaacatctaggtattattgaggatatatatacaatatatatattagtgtcataacactcaattctaacactcaccacatcgttacattattaattcaaacaattcaagttgtgggacaaaatggatcccattattaatggaaattctgctaatgtttatctaaccgatagttatttaaaaggtgttatctctttctcagagtgtaatgctttaggaagttacatattcaatggtccttatctcaaaaatgattataccaacttaattagtagacaaaatccattaatagaacacatgaatctaaagaaactaaatataacacagtccttaatatctaagtatcataaaggtgaaataaaattagaagaacctacttattttcagtcattacttatgacatacaagagtatgacctcgtcagaacagattgctaccactaatttacttaaaaagataataagaagagctatagaaataagtgatgtcaaagtctatgctatattgaataaactagggcttaaagaaaaggacaagattaaatccaacaatggacaagatgaagacaactcagttattacgaccataatcaaagatgatatactttcagctgttaaagataatcaatctcatcttaaagcagacaaaaatcactctacaaaacaaaaagacacaatcaaaacaacactcttgaagaaattgatgtgttcaatgcaacatcctccatcatggttaatacattggtttaacttatacacaaaattaaacaacatattaacacagtatcgatcaaatgaggtaaaaaaccatgggtttacattgatagataatcaaactcttagtggatttcaatttattttgaaccaatatggttgtatagtttatcataaggaactcaaaagaattactgtgacaacctataatcaattcttgacatggaaagatattagccttagtagattaaatgtttgtttaattacatggattagtaactgcttgaacacattaaataaaagcttaggcttaagatgcggattcaataatgttatcttgacacaactattcctttatggagattgtatactaaagctatttcacaatgaggggttctacataataaaagaggtagagggatttattatgtctctaattttaaatataacagaagaagatcaattcagaaaacgattttataatagtatgctcaacaacatcacagatgctgctaataaagctcagaaaaatctgctatcaagagtatgtcatacattattagataagacagtgtccgataatataataaatggcagatggataattctattaagtaagttccttaaattaattaagcttgcaggtgacaataaccttaacaatctgagtgaactatattttttgttcagaatatttggacacccaatggtagatgaaagacaagccatggatgctgttaaaattaattgcaatgagaccaaattttacttgttaagcagtctgagtatgttaagaggtgcctttatatatagaattataaaagggtttgtaaataattacaacagatggcctactttaagaaatgctattgttttacccttaagatggttaacttactataaactaaacacttatccttctttgttggaacttacagaaagagatttgattgtgttatcaggactacgtttctatcgtgagtttcggttgcctaaaaaagtggatcttgaaatgattataaatgataaagctatatcacctcctaaaaatttgatatggactagtttccctagaaattacatgccatcacacatacaaaactatatagaacatgaaaaattaaaattttccgagagtgataaatcaagaagagtattagagtattatttaagagataacaaattcaatgaatgtgatttatacaactgtgtagttaatcaaagttatctcaacaaccctaatcatgtggtatcattgacaggcaaagaaagagaactcagtgtaggtagaatgtttgcaatgcaaccgggaatgttcagacaggttcaaatattggcagagaaaatgatagctgaaaacattttacaattctttcctgaaagtcttacaagatatggtgatctagaactacaaaaaatattagaattgaaagcaggaataagtaacaaatcaaatcgctacaatgataattacaacaattacattagtaagtgctctatcatcacagatctcagcaaattcaatcaagcatttcgatatgaaacgtcatgtatttgtagtgatgtgctggatgaactgcatggtgtacaatctctattttcctggttacatttaactattcctcatgtcacaataatatgcacatataggcatgcacccccctatataggagatcatattgtagatcttaacaatgtagatgaacaaagtggattatatagatatcacatgggtggcatcgaagggtggtgtcaaaaactgtggaccatagaagctatatcactattggatctaatatctctcaaagggaaattctcaattactgctttaattaatggtgacaatcaatcaatagatataagcaaaccaatcagactcatggaaggtcaaactcatgctcaagcagattatttgctagcattaaatagccttaaattactgtataaagagtatgcaggcataggccacaaattaaaaggaactgagacttatatatcacgagatatgcaatttatgagtaaaacaattcaacataacggtgtatattacccagctagtataaagaaagtcctaagagtgggaccgtggataaacactatacttgatgatttcaaagtgagtctagaatctataggtagtttgacacaagaattagaatatagaggtgaaagtctattatgcagtttaatatttagaaatgtatggttatataatcagattgctctacaattaaaaaatcatgcattatgtaacaataaactatatttggacatattaaaggttctgaaacacttaaaaaccttttttaatcttgataatattgatacagcattaacattgtatatgaatttacccatgttatttggtggtggtgatcccaacttgttatatcgaagtttctatagaagaactcctgacttcctcacagaggctatagttcactctgtgttcatacttagttattatacaaaccatgacttaaaagataaacttcaagatctgtcagatgatagattgaataagttcttaacatgcataatcacgtttgacaaaaaccctaatgctgaattcgtaacattgatgagagatcctcaagctttagggtctgagagacaagctaaaattactagcgaaatcaatagactggcagttacagaggttttgagtacagctccaaacaaaatattctccaaaagtgcacaacattatactactacagagatagatctaaatgatattatgcaaaatatagaacctacatatcctcatgggctaagagttgtttatgaaagtttacccttttataaagcagagaaaatagtaaatcttatatcaggtacaaaatctataactaacatactggaaaaaacttctgccatagacttaacagatattgatagagccactgagatgatgaggaaaaacataactttgcttataaggatacttccattggattgtaacagagataaaagagagatattgagtatggaaaacctaagtattactgaattaagcaaatatgttagggaaagatcttggtctttatccaatatagttggtgttacatcacccagtatcatgtatacaatggacatcaaatatactacaagcactatatctagtggcataattatagagaaatataatgttaacagtttaacacgtggtgagagaggacccactaaaccatgggttggttcatctacacaagagaaaaaaacaatgccagtttataatagacaagtcttaaccaaaaaacagagagatcaaatagatctattagcaaaattggattgggtgtatgcatctatagataacaaggatgaattcatggaagaactcagcataggaacccttgggttaacatatgaaaaggccaagaaattatttccacaatatttaagtgtcaattatttgcatcgccttacagtcagtagtagaccatgtgaattccctgcatcaataccagcttatagaacaacaaattatcactttgacactagccctattaatcgcatattaacagaaaagtatggtgatgaagatattgacatagtattccaaaactgtataagctttggccttagtttaatgtcagtagtagaacaatttactaatgtatgtcctaacagaattattctcatacctaagcttaatgagatacatttgatgaaacctcccatattcacaggtgatgttgatattcacaagttaaaacaagtgatacaaaaacagcatatgtttttaccagacaaaataagtttgactcaatatgtggaattattcttaagtaataaaacactcaaatctggatctcatgttaattctaatttaatattggcacataaaatatctgactattttcataatacttacattttaagtactaatttagctggacattggattctgattatacaacttatgaaagattctaaaggtatttttgaaaaagattggggagagggatatataactgatcatatgtttattaatttgaaagttttcttcaatgcttataagacctatctcttgtgttttcataaaggttatggcaaagcaaagctggagtgtgatatgaacacttcagatcttctatgtgtattggaattaatagacagtagttattggaagtctatgtctaaggtatttttagaacaaaaagttatcaaatacattcttagccaagatgcaagtttacatagagtaaaaggatgtcatagcttcaaattatggtttcttaaacgtcttaatgtagcagaattcacagtttgcccttgggttgttaacatagattatcatccaacacatatgaaagcaatattaacttatatagatcttgttagaatgggattgataaatatagatagaatacacattaaaaataaacacaaattcaatgatgaattttatacttctaatctcttctacattaattataacttctcagataatactcatctattaactaaacatataaggattgctaattctgaattagaaaataattacaacaaattatatcatcctacaccagaaaccctagagaatatactagccaatccgattaaaagtaatgacaaaaagacactgaatgactattgtataggtaaaaatgttgactcaataatgttaccattgttatctaataagaagcttattaaatcgtctgcaatgattagaaccaattacagcaaacaagatttgtataatttattccctatggttgtgattgatagaattatagatcattcaggcaatacagccaaatccaaccaactttacactactacttcccaccaaatatctttagtgcacaatagcacatcactttactgcatgcttccttggcatcatattaatagattcaattttgtatttagttctacaggttgtaaaattagtatagagtatattttaaaagatcttaaaattaaagatcccaattgtatagcattcataggtgaaggagcagggaatttattattgcgtacagtagtggaacttcatcctgacataagatatatttacagaagtctgaaagattgcaatgatcatagtttacctattgagtttttaaggctgtacaatggacatatcaacattgattatggtgaaaatttgaccattcctgctacagatgcaaccaacaacattcattggtcttatttacatataaagtttgctgaacctatcagtctttttgtctgtgatgccgaattgtctgtaacagtcaactggagtaaaattataatagaatggagcaagcatgtaagaaagtgcaagtactgttcctcagttaataaatgtatgttaatagtaaaatatcatgctcaagatgatattgatttcaaattagacaatataactatattaaaaacttatgtatgcttaggcagtaagttaaagggatcggaggtttacttagtccttacaataggtcctgcgaatatattcccagtatttaatgtagtacaaaatgctaaattgatactatcaagaaccaaaaatttcatcatgcctaagaaagctgataaagagtctattgatgcaaatattaaaagtttgataccctttctttgttaccctataacaaaaaaaggaattaatactgcattgtcaaaactaaagagtgttgttagtggagatatactatcatattctatagctggacgtaatgaagttttcagcaataaacttataaatcataagcatatgaacatcttaaaatggttcaatcatgttttaaatttcagatcaacagaactaaactataaccatttatatatggtagaatctacatatccttacctaagtgaattgttaaacagcttgacaaccaatgaacttaaaaaactgattaaaatcacaggtagtctgttatacaactttcataatgaataatgaataaagatcttataataaaaattcccatagctatacactaacactgtattcaattatagttattaaaaattaaaaatcgtacgattttttaaataacttttagtgaactaatcctaaagttatcattttaatcttggaggaataaatttaaaccctaatctaattggtttatatgtgtattaactaaattacgagatattagtttttgacactttttttctcgt

SEQ ID NO: 15 - DNA, 15953 bp, Artificial Sequence
  Description of Artificial Sequence: Synthetic polynucleotide
acgcgaaaaaatgcgtacaacaaacttgcataaaccaaaaaaatggggcaaataagaatttgataagtaccacttaaatttaactcccttgcttagcgatgggttcgaattcgctatcgatgataaaagtacgtctacaaaatctatttgataatgatgaagtagcgctactaaaaataacgtgttatacggataaactaatacatctaacgaatgcgctagcgaaagcggtaatacatacgataaaactaaatggtatagtatttgtacatgtaataacgtcgtcggatatatgtccgaataataatatagtagtaaaatcgaattttacgacgatgccggtactacaaaatggtggttatatatgggaaatgatggaactaacgcattgttcgcaaccgaatggtctactagatgataattgtgaaataaaattttcgaaaaaactatcggattcgacgatgacgaattatatgaatcaactatcggaactactaggttttgatctaaatccgtaaattataattaatatcaactagcaaatcaatgtcactaacaccattagttaatataaaacttaacagaagacaaaaatggggcaaataaatcaattcagccaacccaaccatggatacgacgcataatgataatacgccgcaacgtctaatgataacggatatgcgtccgctatcgctagaaacgataataacgtcgctaacgcgtgatataataacgcataaatttatatatctaataaatcatgaatgtatagtacgtaaactagatgaacgtcaagcgacgtttacgtttctagtaaattatgaaatgaaactactacataaagtaggttcgacgaaatataaaaaatatacggaatataatacgaaatatggtacgtttccgatgccgatatttataaatcatgatggttttctagaatgtataggtataaaaccgacgaaacatacgccgataatatataaatatgatctaaatccgtaaatttcaacacaatattcacacaatctaaaacaacaactctatgcataactatactccatagtccagatggagcctgaaaattatagtaatttaaaattaaggagagatataagatagaagatggggcaaatacaaagatggctcttagcaaagtcaagttgaatgatacactcaacaaagatcaacttctgtcatccagcaaatacaccatccaacggagcacaggagatagtattgatactcctaattatgatgtgcagaaacacatcaataagttatgtggcatgttattaatcacagaagatgctaatcataaattcactgggttaataggtatgttatatgcgatgtctaggttaggaagagaagacaccataaaaatactcagagatgcgggatatcatgtaaaagcaaatggagtagatgtaacaacacatcgtcaagacattaatggaaaagaaatgaaatttgaagtgttaacattggcaagcttaacaactgaaattcaaatcaacattgagatagaatctagaaaatcctacaaaaaaatgctaaaagaaatgggagaggtagctccagaatacaggcatgactctcctgattgtgggatgataatattatgtatagcagcattagtaataactaaattagcagcaggggacagatctggtcttacagccgtgattaggagagctaataatgtcctaaaaaatgaaatgaaacgttacaaaggcttactacccaaggacatagccaacagcttctatgaagtgtttgaaaaacatccccactttatagatgtttttgttcattttggtatagcacaatcttctaccagaggtggcagtagagttgaagggatttttgcaggattgtttatgaatgcctatggtgcagggcaagtgatgttacggtggggagtcttagcaaaatcagttaaaaatattatgttaggacatgctagtgtgcaagcagaaatggaacaagttgttgaggtttatgaatatgcccaaaaattgggtggtgaagcaggattctaccatatattgaacaacccaaaagcatcattattatctttgactcaatttcctcacttctccagtgtagtattaggcaatgctgctggcctaggcataatgggagagtacagaggtacaccgaggaatcaagatctatatgatgcagcaaaggcatatgctgaacaactcaaagaaaatggtgtgattaactacagtgtactagacttgacagcagaagaactagaggctatcaaacatcagcttaatccaaaagataatgatgtagagctttgagttaataaaaaatggggcaaataaatcatcatggaaaagtttgctcctgaattccatggagaagatgcaaacaacagggctactaaattcctagaatcaataaagggcaaattcacatcacccaaagatcccaagaaaaaagatagtatcatatctgtcaactcaatagatatagaagtaaccaaagaaagccctataacatcaaattcaactattatcaacccaacaaatgagacagatgatactgcagggaacaagcccaattatcaaagaaaacctctagtaagtttcaaagaagaccctacaccaagtgataatcccttttctaaactatacaaagaaaccatagaaacatttgataacaatgaagaagaatccagctattcatacgaagaaataaatgatcagacaaacgataatataacagcaagattagataggattgatgaaaaattaagtgaaatactaggaatgcttcacacattagtagtggcaagtgcaggacctacatctgctcgggatggtataagagatgccatgattggtttaagagaagaaatgatagaaaaaatcagaactgaagcattaatgaccaatgacagattagaagctatggcaagactcaggaatgaggaaagtgaaaagatggcaaaagacacatcagatgaagtgtctctcaatccaacatcagagaaattgaacaacctattggaagggaatgatagtgacaatgatctatcacttgaagatttctgattagttaccactcttcacatcaacacacaataccaacagaagaccaacaaactaaccaacccaatcatccaaccaaacatccatccgccaatcagccaaacagccaacaaaacaaccagccaatccaaaactaaccacccggaaaaaatctataatatagttacaaaaaaaggaaagggtggggcaaatatggaaacatacgtgaacaagcttcacgaaggctccacatacacagctgctgttcaatacaatgtcttagaaaaagacgatgaccctgcatcacttacaatatgggtgcccatgttccaatcatctatgccagcagatttacttataaaagaactagctaatgtcaacatactagtgaaacaaatatccacacccaagggaccttcactaagagtcatgataaactcaagaagtgcagtgctagcacaaatgcccagcaaatttaccatatgcgctaatgtgtccttggatgaaagaagcaaactagcatatgatgtaaccacaccctgtgaaatcaaggcatgtagtctaacatgcctaaaatcaaaaaatatgttgactacagttaaagatctcactatgaagacactcaaccctacacatgatattattgctttatgtgaatttgaaaacatagtaacatcaaaaaaagtcataataccaacatacctaagatccatcagtgtcagaaataaagatctgaacacacttgaaaatataacaaccactgaattcaaaaatgctatcacaaatgcaaaaatcatcccttactcaggattactattagtcatcacagtgactgacaacaaaggagcattcaaatacataaagccacaaagtcaattcatagtagatcttggagcttacctagaaaaagaaagtatatattatgttaccacaaattggaagcacacagctacacgatttgcaatcaaacccatggaagattaacctttttcctctacatcagtgtgttaattcatacaaactttctacctacattcttcacttcaccatcacaatcacaaacactctgtggttcaaccaatcaaacaaaacttatctgaagtcccagatcatcccaagtcattgtttatcagatctagtactcaaataagttaataaaaaatatacacatggacgtccatggggcaaatgcaaacatgtttgtttttcttgttttattgccactagtctctagtcagtgtgttaatcttacaaccagaactcaattaccccctgcatacactaattctttcacacgtggtgtttattaccctgacaaagttttcagatcctcagttttacattcaactcaggacttgttcttacctttcttttccaatgttacttggttccatgctatacatgtctctgggaccaatggtactaagaggtttgataaccctgtcctaccatttaatgatggtgtttattttgcttccactgagaagtctaacataataagaggctggatttttggtactactttagattcgaagacccagtccctacttattgttaataacgctactaatgttgttattaaagtctgtgaatttcaattttgtaatgatccatttttgggtgtttattaccacaaaaacaacaaaagttggatggaaagtgagttcagagtttattctagtgcgaataattgcacttttgaatatgtctctcagccttttcttatggaccttgaaggaaaacagggtaatttcaaaaatcttagggaatttgtgtttaagaatattgatggttattttaaaatatattctaagcacacgcctattaatttagtgcgtgatctccctcagggtttttcggctttagaaccattggtagatttgccaataggtattaacatcactaggtttcaaactttacttgctttacatagaagttatttgactcctggtgattcttcttcaggttggacagctggtgctgcagcttattatgtgggttatcttcaacctaggacttttctattaaaatataatgaaaatggaaccattacagatgctgtagactgtgcacttgaccctctctcagaaacaaagtgtacgttgaaatccttcactgtagaaaaaggaatctatcaaacttctaactttagagtccaaccaacagaatctattgttagatttcctaatattacaaacttgtgcccttttggtgaagtttttaacgccaccagatttgcatctgtttatgcttggaacaggaagagaatcagcaactgtgttgctgattattctgtcctatataattccgcatcattttccacttttaagtgttatggagtgtctcctactaaattaaatgatctctgctttactaatgtctatgcagattcatttgtaattagaggtgatgaagtcagacaaatcgctccagggcaaactggaaagattgctgattataattataaattaccagatgattttacaggctgcgttatagcttggaattctaacaatcttgattctaaggttggtggtaattataattacctgtatagattgtttaggaagtctaatctcaaaccttttgagagagatatttcaactgaaatctatcaggccggtagcacaccttgtaatggtgttgaaggttttaattgttactttcctttacaatcatatggtttccaacccactaatggtgttggttaccaaccatacagagtagtagtactttcttttgaacttctacatgcaccagcaactgtttgtggacctaaaaagtctactaatttggttaaaaacaaatgtgtcaatttcaacttcaatggtttaacaggcacaggtgttcttactgagtctaacaaaaagtttctgcctttccaacaatttggcagagacattgctgacactactgatgctgtccgtgatccacagacacttgagattcttgacattacaccatgttcttttggtggtgtcagtgttataacaccaggaacaaatacttctaaccaggttgctgttctttatcaggatgttaactgcacagaagtccctgttgctattcatgcagatcaacttactcctacttggcgtgtttattctacaggttctaatgtttttcaaacacgtgcaggctgtttaataggggctgaacatgtcaacaactcatatgagtgtgacatacccattggtgcaggtatatgcgctagttatcagactcagactaattctcctcggcgggcacgtagtgtagctagtcaatccatcattgcctacactatgtcacttggtgcagaaaattcagttgcttactctaataactctattgccatacccacaaattttactattagtgttaccacagaaattctaccagtgtctatgaccaagacatcagtagattgtacaatgtacatttgtggtgattcaactgaatgcagcaatcttttgttgcaatatggcagtttttgtacacaattaaaccgtgctttaactggaatagctgttgaacaagacaaaaacacccaagaagtttttgcacaagtcaaacaaatttacaaaacaccaccaattaaagattttggtggttttaatttttcacaaatattaccagatccatcaaaaccaagcaagaggtcatttattgaagatctacttttcaacaaagtgacacttgcagatgctggcttcatcaaacaatatggtgattgccttggtgatattgctgctagagacctcatttgtgcacaaaagtttaacggccttactgttttgccacctttgctcacagatgaaatgattgctcaatacacttctgcactgttagcgggtacaatcacttctggttggacctttggtgcaggtgctgcattacaaataccatttgctatgcaaatggcttataggtttaatggtattggagttacacagaatgttctctatgagaaccaaaaattgattgccaaccaatttaatagtgctattggcaaaattcaagactcactttcttccacagcaagtgcacttggaaaacttcaagatgtggtcaaccaaaatgcacaagctttaaacacgcttgttaaacaacttagctccaattttggtgcaatttcaagtgttttaaatgatatcctttcacgtcttgacaaagttgaggctgaagtgcaaattgataggttgatcacaggcagacttcaaagtttgcagacatatgtgactcaacaattaattagagctgcagaaatcagagcttctgctaatcttgctgctactaaaatgtcagagtgtgtacttggacaatcaaaaagagttgatttttgtggaaagggctatcatcttatgtccttccctcagtcagcacctcatggtgtagtcttcttgcatgtgacttatgtccctgcacaagaaaagaacttcacaactgctcctgccatttgtcatgatggaaaagcacactttcctcgtgaaggtgtctttgtttcaaatggcacacactggtttgtaacacaaaggaatttttatgaaccacaaatcattactacagacaacacatttgtgtctggtaactgtgatgttgtaataggaattgtcaacaacacagtttatgatcctttgcaacctgaattagactcattcaaggaggagttagataaatattttaagaatcatacatcaccagatgttgatttaggtgacatctctggcattaatgcttcagttgtaaacattcaaaaagaaattgaccgcctcaatgaggttgccaagaatttaaatgaatctctcatcgatctccaagaacttggaaagtatgagcagtatataaaatggccatggtacatttggctaggttttatagctggcttgattgccatagtaatggtgacaattatgctttgctgtatgaccagttgctgtagttgtctcaagggctgttgttcttgtggatcctgctgcaaatttgatgaagacgacggactgctcctatactgtaaggccagaagcacaccaatcacactaagcaaggatcaactgagtggtataaataatattgcatttagtaactaaataaaaatagcacctaatcatgttcttacaatggtttactatctgctcatagacaacccatctatcattggattttcttaaaatctgaacttcatcgaaactcttatctataaaccatctcacttacactatttaagtagattcctagtttatagttatataaaacacaattgaatgccagtcgaccttaccatctgtaaaaatgaaaactggggcaaatatgtcacgaaggaatccttgcaaatttgaaattcgaggtcattgcttaaatggtaagaggtgtcattttagtcataattattttgaatggccaccccatgcactgcttgtaagacaaaactttatgttaaacagaatacttaagtctatggataaaagtatagataccttatcagaaataagtggagctgcagagttggacagaacagaagagtatgctcttggtgtagttggagtgctagagagttatataggatcaataaacaatataactaaacaatcagcatgtgttgccatgagcaaactcctcactgaactcaatagtgatgatatcaaaaagctgagggacaatgaagagctaaattcacccaagataagagtgtacaatactgtcatatcatatattgaaagcaacaggaaaaacaataaacaaactatccatctgttaaaaagattgccagcagacgtattgaagaaaaccatcaaaaacacattggatatccataagagcataaccatcaacaacccaaaagaatcaactgttagtgatacaaatgaccatgccaaaaataatgatactacctgacaaatatccttgtagtataacttccatactaataacaagtagatgtagagttactatgtataatcaaaagaacacactatatttcaatcaaaacaacccaaataaccatatgtactcaccgaatcaaacattcaatgaaatccattggacctctcaagaattgattgacacaattcaaaattttctacaacatctaggtattattgaggatatatatacaatatatatattagtgtcataacactcaattctaacactcaccacatcgttacattattaattcaaacaattcaagttgtgggacaaaatggatcccattattaatggaaattctgctaatgtttatctaaccgatagttatttaaaaggtgttatctctttctcagagtgtaatgctttaggaagttacatattcaatggtccttatctcaaaaatgattataccaacttaattagtagacaaaatccattaatagaacacatgaatctaaagaaactaaatataacacagtccttaatatctaagtatcataaaggtgaaataaaattagaagaacctacttattttcagtcattacttatgacatacaagagtatgacctcgtcagaacagattgctaccactaatttacttaaaaagataataagaagagctatagaaataagtgatgtcaaagtctatgctatattgaataaactagggcttaaagaaaaggacaagattaaatccaacaatggacaagatgaagacaactcagttattacgaccataatcaaagatgatatactttcagctgttaaagataatcaatctcatcttaaagcagacaaaaatcactctacaaaacaaaaagacacaatcaaaacaacactcttgaagaaattgatgtgttcaatgcaacatcctccatcatggttaatacattggtttaacttatacacaaaattaaacaacatattaacacagtatcgatcaaatgaggtaaaaaaccatgggtttacattgatagataatcaaactcttagtggatttcaatttattttgaaccaatatggttgtatagtttatcataaggaactcaaaagaattactgtgacaacctataatcaattcttgacatggaaagatattagccttagtagattaaatgtttgtttaattacatggattagtaactgcttgaacacattaaataaaagcttaggcttaagatgcggattcaataatgttatcttgacacaactattcctttatggagattgtatactaaagctatttcacaatgaggggttctacataataaaagaggtagagggatttattatgtctctaattttaaatataacagaagaagatcaattcagaaaacgattttataatagtatgctcaacaacatcacagatgctgctaataaagctcagaaaaatctgctatcaagagtatgtcatacattattagataagacagtgtccgataatataataaatggcagatggataattctattaagtaagttccttaaattaattaagcttgcaggtgacaataaccttaacaatctgagtgaactatattttttgttcagaatatttggacacccaatggtagatgaaagacaagccatggatgctgttaaaattaattgcaatgagaccaaattttacttgttaagcagtctgagtatgttaagaggtgcctttatatatagaattataaaagggtttgtaaataattacaacagatggcctactttaagaaatgctattgttttacccttaagatggttaacttactataaactaaacacttatccttctttgttggaacttacagaaagagatttgattgtgttatcaggactacgtttctatcgtgagtttcggttgcctaaaaaagtggatcttgaaatgattataaatgataaagctatatcacctcctaaaaatttgatatggactagtttccctagaaattacatgccatcacacatacaaaactatatagaacatgaaaaattaaaattttccgagagtgataaatcaagaagagtattagagtattatttaagagataacaaattcaatgaatgtgatttatacaactgtgtagttaatcaaagttatctcaacaaccctaatcatgtggtatcattgacaggcaaagaaagagaactcagtgtaggtagaatgtttgcaatgcaaccgggaatgttcagacaggttcaaatattggcagagaaaatgatagctgaaaacattttacaattctttcctgaaagtcttacaagatatggtgatctagaactacaaaaaatattagaattgaaagcaggaataagtaacaaatcaaatcgctacaatgataattacaacaattacattagtaagtgctctatcatcacagatctcagcaaattcaatcaagcatttcgatatgaaacgtcatgtatttgtagtgatgtgctggatgaactgcatggtgtacaatctctattttcctggttacatttaactattcctcatgtcacaataatatgcacatataggcatgcacccccctatataggagatcatattgtagatcttaacaatgtagatgaacaaagtggattatatagatatcacatgggtggcatcgaagggtggtgtcaaaaactgtggaccatagaagctatatcactattggatctaatatctctcaaagggaaattctcaattactgctttaattaatggtgacaatcaatcaatagatataagcaaaccaatcagactcatggaaggtcaaactcatgctcaagcagattatttgctagcattaaatagccttaaattactgtataaagagtatgcaggcataggccacaaattaaaaggaactgagacttatatatcacgagatatgcaatttatgagtaaaacaattcaacataacggtgtatattacccagctagtataaagaaagtcctaagagtgggaccgtggataaacactatacttgatgatttcaaagtgagtctagaatctataggtagtttgacacaagaattagaatatagaggtgaaagtctattatgcagtttaatatttagaaatgtatggttatataatcagattgctctacaattaaaaaatcatgcattatgtaacaataaactatatttggacatattaaaggttctgaaacacttaaaaaccttttttaatcttgataatattgatacagcattaacattgtatatgaatttacccatgttatttggtggtggtgatcccaacttgttatatcgaagtttctatagaagaactcctgacttcctcacagaggctatagttcactctgtgttcatacttagttattatacaaaccatgacttaaaagataaacttcaagatctgtcagatgatagattgaataagttcttaacatgcataatcacgtttgacaaaaaccctaatgctgaattcgtaacattgatgagagatcctcaagctttagggtctgagagacaagctaaaattactagcgaaatcaatagactggcagttacagaggttttgagtacagctccaaacaaaatattctccaaaagtgcacaacattatactactacagagatagatctaaatgatattatgcaaaatatagaacctacatatcctcatgggctaagagttgtttatgaaagtttacccttttataaagcagagaaaatagtaaatcttatatcaggtacaaaatctataactaacatactggaaaaaacttctgccatagacttaacagatattgatagagccactgagatgatgaggaaaaacataactttgcttataaggatacttccattggattgtaacagagataaaagagagatattgagtatggaaaacctaagtattactgaattaagcaaatatgttagggaaagatcttggtctttatccaatatagttggtgttacatcacccagtatcatgtatacaatggacatcaaatatactacaagcactatatctagtggcataattatagagaaatataatgttaacagtttaacacgtggtgagagaggacccactaaaccatgggttggttcatctacacaagagaaaaaaacaatgccagtttataatagacaagtcttaaccaaaaaacagagagatcaaatagatctattagcaaaattggattgggtgtatgcatctatagataacaaggatgaattcatggaagaactcagcataggaacccttgggttaacatatgaaaaggccaagaaattatttccacaatatttaagtgtcaattatttgcatcgccttacagtcagtagtagaccatgtgaattccctgcatcaataccagcttatagaacaacaaattatcactttgacactagccctattaatcgcatattaacagaaaagtatggtgatgaagatattgacatagtattccaaaactgtataagctttggccttagtttaatgtcagtagtagaacaatttactaatgtatgtcctaacagaattattctcatacctaagcttaatgagatacatttgatgaaacctcccatattcacaggtgatgttgatattcacaagttaaaacaagtgatacaaaaacagcatatgtttttaccagacaaaataagtttgactcaatatgtggaattattcttaagtaataaaacactcaaatctggatctcatgttaattctaatttaatattggcacataaaatatctgactattttcataatacttacattttaagtactaatttagctggacattggattctgattatacaacttatgaaagattctaaaggtatttttgaaaaagattggggagagggatatataactgatcatatgtttattaatttgaaagttttcttcaatgcttataagacctatctcttgtgttttcataaaggttatggcaaagcaaagctggagtgtgatatgaacacttcagatcttctatgtgtattggaattaatagacagtagttattggaagtctatgtctaaggtatttttagaacaaaaagttatcaaatacattcttagccaagatgcaagtttacatagagtaaaaggatgtcatagcttcaaattatggtttcttaaacgtcttaatgtagcagaattcacagtttgcccttgggttgttaacatagattatcatccaacacatatgaaagcaatattaacttatatagatcttgttagaatgggattgataaatatagatagaatacacattaaaaataaacacaaattcaatgatgaattttatacttctaatctcttctacattaattataacttctcagataatactcatctattaactaaacatataaggattgctaattctgaattagaaaataattacaacaaattatatcatcctacaccagaaaccctagagaatatactagccaatccgattaaaagtaatgacaaaaagacactgaatgactattgtataggtaaaaatgttgactcaataatgttaccattgttatctaataagaagcttattaaatcgtctgcaatgattagaaccaattacagcaaacaagatttgtataatttattccctatggttgtgattgatagaattatagatcattcaggcaatacagccaaatccaaccaactttacactactacttcccaccaaatatctttagtgcacaatagcacatcactttactgcatgcttccttggcatcatattaatagattcaattttgtatttagttctacaggttgtaaaattagtatagagtatattttaaaagatcttaaaattaaagatcccaattgtatagcattcataggtgaaggagcagggaatttattattgcgtacagtagtggaacttcatcctgacataagatatatttacagaagtctgaaagattgcaatgatcatagtttacctattgagtttttaaggctgtacaatggacatatcaacattgattatggtgaaaatttgaccattcctgctacagatgcaaccaacaacattcattggtcttatttacatataaagtttgctgaacctatcagtctttttgtctgtgatgccgaattgtctgtaacagtcaactggagtaaaattataatagaatggagcaagcatgtaagaaagtgcaagtactgttcctcagttaataaatgtatgttaatagtaaaatatcatgctcaagatgatattgatttcaaattagacaatataactatattaaaaacttatgtatgcttaggcagtaagttaaagggatcggaggtttacttagtccttacaataggtcctgcgaatatattcccagtatttaatgtagtacaaaatgctaaattgatactatcaagaaccaaaaatttcatcatgcctaagaaagctgataaagagtctattgatgcaaatattaaaagtttgataccctttctttgttaccctataacaaaaaaaggaattaatactgcattgtcaaaactaaagagtgttgttagtggagatatactatcatattctatagctggacgtaatgaagttttcagcaataaacttataaatcataagcatatgaacatcttaaaatggttcaatcatgttttaaatttcagatcaacagaactaaactataaccatttatatatggtagaatctacatatccttacctaagtgaattgttaaacagcttgacaaccaatgaacttaaaaaactgattaaaatcacaggtagtctgttatacaactttcataatgaataatgaataaagatcttataataaaaattcccatagctatacactaacactgtattcaattatagttattaaaaattaaaaatcgtacgattttttaaataacttttagtgaactaatcctaaagttatcattttaatcttggaggaataaatttaaaccctaatctaattggtttatatgtgtattaactaaattacgagatattagtttttgacactttttttctcgt

SEQ ID NO: 16 - DNA, 15908 bp, Artificial Sequence
  Description of Artificial Sequence: Synthetic polynucleotide
acgcgaaaaaatgcgtacaacaaacttgcataaaccaaaaaaatggggcaaataagaatttgataagtaccacttaaatttaactcccttgcttagcgatgggttcgaattcgctatcgatgataaaagtacgtctacaaaatctatttgataatgatgaagtagcgctactaaaaataacgtgttatacggataaactaatacatctaacgaatgcgctagcgaaagcggtaatacatacgataaaactaaatggtatagtatttgtacatgtaataacgtcgtcggatatatgtccgaataataatatagtagtaaaatcgaattttacgacgatgccggtactacaaaatggtggttatatatgggaaatgatggaactaacgcattgttcgcaaccgaatggtctactagatgataattgtgaaataaaattttcgaaaaaactatcggattcgacgatgacgaattatatgaatcaactatcggaactactaggttttgatctaaatccgtaaattataattaatatcaactagcaaatcaatgtcactaacaccattagttaatataaaacttaacagaagacaaaaatggggcaaataaatcaattcagccaacccaaccatggatacgacgcataatgataatacgccgcaacgtctaatgataacggatatgcgtccgctatcgctagaaacgataataacgtcgctaacgcgtgatataataacgcataaatttatatatctaataaatcatgaatgtatagtacgtaaactagatgaacgtcaagcgacgtttacgtttctagtaaattatgaaatgaaactactacataaagtaggttcgacgaaatataaaaaatatacggaatataatacgaaatatggtacgtttccgatgccgatatttataaatcatgatggttttctagaatgtataggtataaaaccgacgaaacatacgccgataatatataaatatgatctaaatccgtaaatttcaacacaatattcacacaatctaaaacaacaactctatgcataactatactccatagtccagatggagcctgaaaattatagtaatttaaaattaaggagagatataagatagaagatggggcaaatacaaagatggctcttagcaaagtcaagttgaatgatacactcaacaaagatcaacttctgtcatccagcaaatacaccatccaacggagcacaggagatagtattgatactcctaattatgatgtgcagaaacacatcaataagttatgtggcatgttattaatcacagaagatgctaatcataaattcactgggttaataggtatgttatatgcgatgtctaggttaggaagagaagacaccataaaaatactcagagatgcgggatatcatgtaaaagcaaatggagtagatgtaacaacacatcgtcaagacattaatggaaaagaaatgaaatttgaagtgttaacattggcaagcttaacaactgaaattcaaatcaacattgagatagaatctagaaaatcctacaaaaaaatgctaaaagaaatgggagaggtagctccagaatacaggcatgactctcctgattgtgggatgataatattatgtatagcagcattagtaataactaaattagcagcaggggacagatctggtcttacagccgtgattaggagagctaataatgtcctaaaaaatgaaatgaaacgttacaaaggcttactacccaaggacatagccaacagcttctatgaagtgtttgaaaaacatccccactttatagatgtttttgttcattttggtatagcacaatcttctaccagaggtggcagtagagttgaagggatttttgcaggattgtttatgaatgcctatggtgcagggcaagtgatgttacggtggggagtcttagcaaaatcagttaaaaatattatgttaggacatgctagtgtgcaagcagaaatggaacaagttgttgaggtttatgaatatgcccaaaaattgggtggtgaagcaggattctaccatatattgaacaacccaaaagcatcattattatctttgactcaatttcctcacttctccagtgtagtattaggcaatgctgctggcctaggcataatgggagagtacagaggtacaccgaggaatcaagatctatatgatgcagcaaaggcatatgctgaacaactcaaagaaaatggtgtgattaactacagtgtactagacttgacagcagaagaactagaggctatcaaacatcagcttaatccaaaagataatgatgtagagctttgagttaataaaaaatggggcaaataaatcatcatggaaaagtttgctcctgaattccatggagaagatgcaaacaacagggctactaaattcctagaatcaataaagggcaaattcacatcacccaaagatcccaagaaaaaagatagtatcatatctgtcaactcaatagatatagaagtaaccaaagaaagccctataacatcaaattcaactattatcaacccaacaaatgagacagatgatactgcagggaacaagcccaattatcaaagaaaacctctagtaagtttcaaagaagaccctacaccaagtgataatcccttttctaaactatacaaagaaaccatagaaacatttgataacaatgaagaagaatccagctattcatacgaagaaataaatgatcagacaaacgataatataacagcaagattagataggattgatgaaaaattaagtgaaatactaggaatgcttcacacattagtagtggcaagtgcaggacctacatctgctcgggatggtataagagatgccatgattggtttaagagaagaaatgatagaaaaaatcagaactgaagcattaatgaccaatgacagattagaagctatggcaagactcaggaatgaggaaagtgaaaagatggcaaaagacacatcagatgaagtgtctctcaatccaacatcagagaaattgaacaacctattggaagggaatgatagtgacaatgatctatcacttgaagatttctgattagttaccactcttcacatcaacacacaataccaacagaagaccaacaaactaaccaacccaatcatccaaccaaacatccatccgccaatcagccaaacagccaacaaaacaaccagccaatccaaaactaaccacccggaaaaaatctataatatagttacaaaaaaaggaaagggtggggcaaatatggaaacatacgtgaacaagcttcacgaaggctccacatacacagctgctgttcaatacaatgtcttagaaaaagacgatgaccctgcatcacttacaatatgggtgcccatgttccaatcatctatgccagcagatttacttataaaagaactagctaatgtcaacatactagtgaaacaaatatccacacccaagggaccttcactaagagtcatgataaactcaagaagtgcagtgctagcacaaatgcccagcaaatttaccatatgcgctaatgtgtccttggatgaaagaagcaaactagcatatgatgtaaccacaccctgtgaaatcaaggcatgtagtctaacatgcctaaaatcaaaaaatatgttgactacagttaaagatctcactatgaagacactcaaccctacacatgatattattgctttatgtgaatttgaaaacatagtaacatcaaaaaaagtcataataccaacatacctaagatccatcagtgtcagaaataaagatctgaacacacttgaaaatataacaaccactgaattcaaaaatgctatcacaaatgcaaaaatcatcccttactcaggattactattagtcatcacagtgactgacaacaaaggagcattcaaatacataaagccacaaagtcaattcatagtagatcttggagcttacctagaaaaagaaagtatatattatgttaccacaaattggaagcacacagctacacgatttgcaatcaaacccatggaagattaacctttttcctctacatcagtgtgttaattcatacaaactttctacctacattcttcacttcaccatcacaatcacaaacactctgtggttcaaccaatcaaacaaaacttatctgaagtcccagatcatcccaagtcattgtttatcagatctagtactcaaataagttaataaaaaatatacacatggacgtccatggggcaaatgcaaacatgtttgtttttcttgttttattgccactagtctctagtcagtgtgttaatcttacaaccagaactcaattaccccctgcatacactaattctttcacacgtggtgtttattaccctgacaaagttttcagatcctcagttttacattcaactcaggacttgttcttacctttcttttccaatgttacttggttccatgctatacatgtctctgggaccaatggtactaagaggtttgataaccctgtcctaccatttaatgatggtgtttattttgcttccactgagaagtctaacataataagaggctggatttttggtactactttagattcgaagacccagtccctacttattgttaataacgctactaatgttgttattaaagtctgtgaatttcaattttgtaatgatccatttttgggtgtttattaccacaaaaacaacaaaagttggatggaaagtgagttcagagtttattctagtgcgaataattgcacttttgaatatgtctctcagccttttcttatggaccttgaaggaaaacagggtaatttcaaaaatcttagggaatttgtgtttaagaatattgatggttattttaaaatatattctaagcacacgcctattaatttagtgcgtgatctccctcagggtttttcggctttagaaccattggtagatttgccaataggtattaacatcactaggtttcaaactttacttgctttacatagaagttatttgactcctggtgattcttcttcaggttggacagctggtgctgcagcttattatgtgggttatcttcaacctaggacttttctattaaaatataatgaaaatggaaccattacagatgctgtagactgtgcacttgaccctctctcagaaacaaagtgtacgttgaaatccttcactgtagaaaaaggaatctatcaaacttctaactttagagtccaaccaacagaatctattgttagatttcctaatattacaaacttgtgcccttttggtgaagtttttaacgccaccagatttgcatctgtttatgcttggaacaggaagagaatcagcaactgtgttgctgattattctgtcctatataattccgcatcattttccacttttaagtgttatggagtgtctcctactaaattaaatgatctctgctttactaatgtctatgcagattcatttgtaattagaggtgatgaagtcagacaaatcgctccagggcaaactggaaagattgctgattataattataaattaccagatgattttacaggctgcgttatagcttggaattctaacaatcttgattctaaggttggtggtaattataattacctgtatagattgtttaggaagtctaatctcaaaccttttgagagagatatttcaactgaaatctatcaggccggtagcacaccttgtaatggtgttgaaggttttaattgttactttcctttacaatcatatggtttccaacccactaatggtgttggttaccaaccatacagagtagtagtactttcttttgaacttctacatgcaccagcaactgtttgtggacctaaaaagtctactaatttggttaaaaacaaatgtgtcaatttcaacttcaatggtttaacaggcacaggtgttcttactgagtctaacaaaaagtttctgcctttccaacaatttggcagagacattgctgacactactgatgctgtccgtgatccacagacacttgagattcttgacattacaccatgttcttttggtggtgtcagtgttataacaccaggaacaaatacttctaaccaggttgctgttctttatcaggatgttaactgcacagaagtccctgttgctattcatgcagatcaacttactcctacttggcgtgtttattctacaggttctaatgtttttcaaacacgtgcaggctgtttaataggggctgaacatgtcaacaactcatatgagtgtgacatacccattggtgcaggtatatgcgctagttatcagactcagactaattctcctcggcgggcacgtagtgtagctagtcaatccatcattgcctacactatgtcacttggtgcagaaaattcagttgcttactctaataactctattgccatacccacaaattttactattagtgttaccacagaaattctaccagtgtctatgaccaagacatcagtagattgtacaatgtacatttgtggtgattcaactgaatgcagcaatcttttgttgcaatatggcagtttttgtacacaattaaaccgtgctttaactggaatagctgttgaacaagacaaaaacacccaagaagtttttgcacaagtcaaacaaatttacaaaacaccaccaattaaagattttggtggttttaatttttcacaaatattaccagatccatcaaaaccaagcaagaggtcatttattgaagatctacttttcaacaaagtgacacttgcagatgctggcttcatcaaacaatatggtgattgccttggtgatattgctgctagagacctcatttgtgcacaaaagtttaacggccttactgttttgccacctttgctcacagatgaaatgattgctcaatacacttctgcactgttagcgggtacaatcacttctggttggacctttggtgcaggtgctgcattacaaataccatttgctatgcaaatggcttataggtttaatggtattggagttacacagaatgttctctatgagaaccaaaaattgattgccaaccaatttaatagtgctattggcaaaattcaagactcactttcttccacagcaagtgcacttggaaaacttcaagatgtggtcaaccaaaatgcacaagctttaaacacgcttgttaaacaacttagctccaattttggtgcaatttcaagtgttttaaatgatatcctttcacgtcttgacaaagttgaggctgaagtgcaaattgataggttgatcacaggcagacttcaaagtttgcagacatatgtgactcaacaattaattagagctgcagaaatcagagcttctgctaatcttgctgctactaaaatgtcagagtgtgtacttggacaatcaaaaagagttgatttttgtggaaagggctatcatcttatgtccttccctcagtcagcacctcatggtgtagtcttcttgcatgtgacttatgtccctgcacaagaaaagaacttcacaactgctcctgccatttgtcatgatggaaaagcacactttcctcgtgaaggtgtctttgtttcaaatggcacacactggtttgtaacacaaaggaatttttatgaaccacaaatcattactacagacaacacatttgtgtctggtaactgtgatgttgtaataggaattgtcaacaacacagtttatgatcctttgcaacctgaattagactcattcaaggaggagttagataaatattttaagaatcatacatcaccagatgttgatttaggtgacatctctggcattaatgcttcagttgtaaacattcaaaaagaaattgaccgcctcaatgaggttgccaagaatttaaatgaatctctcatcgatctccaagaacttggaaagtatgagcagtatataaaatggccatggtacatttggctaggttttatagctggcttgattgccatagtaatggtgacaattatgctttgctgtatgaccagttgctgtagttgtctcaagggactgctcctatactgtaaggccagaagcacaccaatcacactaagcaaggatcaactgagtggtataaataatattgcatttagtaactaaataaaaatagcacctaatcatgttcttacaatggtttactatctgctcatagacaacccatctatcattggattttcttaaaatctgaacttcatcgaaactcttatctataaaccatctcacttacactatttaagtagattcctagtttatagttatataaaacacaattgaatgccagtcgaccttaccatctgtaaaaatgaaaactggggcaaatatgtcacgaaggaatccttgcaaatttgaaattcgaggtcattgcttaaatggtaagaggtgtcattttagtcataattattttgaatggccaccccatgcactgcttgtaagacaaaactttatgttaaacagaatacttaagtctatggataaaagtatagataccttatcagaaataagtggagctgcagagttggacagaacagaagagtatgctcttggtgtagttggagtgctagagagttatataggatcaataaacaatataactaaacaatcagcatgtgttgccatgagcaaactcctcactgaactcaatagtgatgatatcaaaaagctgagggacaatgaagagctaaattcacccaagataagagtgtacaatactgtcatatcatatattgaaagcaacaggaaaaacaataaacaaactatccatctgttaaaaagattgccagcagacgtattgaagaaaaccatcaaaaacacattggatatccataagagcataaccatcaacaacccaaaagaatcaactgttagtgatacaaatgaccatgccaaaaataatgatactacctgacaaatatccttgtagtataacttccatactaataacaagtagatgtagagttactatgtataatcaaaagaacacactatatttcaatcaaaacaacccaaataaccatatgtactcaccgaatcaaacattcaatgaaatccattggacctctcaagaattgattgacacaattcaaaattttctacaacatctaggtattattgaggatatatatacaatatatatattagtgtcataacactcaattctaacactcaccacatcgttacattattaattcaaacaattcaagttgtgggacaaaatggatcccattattaatggaaattctgctaatgtttatctaaccgatagttatttaaaaggtgttatctctttctcagagtgtaatgctttaggaagttacatattcaatggtccttatctcaaaaatgattataccaacttaattagtagacaaaatccattaatagaacacatgaatctaaagaaactaaatataacacagtccttaatatctaagtatcataaaggtgaaataaaattagaagaacctacttattttcagtcattacttatgacatacaagagtatgacctcgtcagaacagattgctaccactaatttacttaaaaagataataagaagagctatagaaataagtgatgtcaaagtctatgctatattgaataaactagggcttaaagaaaaggacaagattaaatccaacaatggacaagatgaagacaactcagttattacgaccataatcaaagatgatatactttcagctgttaaagataatcaatctcatcttaaagcagacaaaaatcactctacaaaacaaaaagacacaatcaaaacaacactcttgaagaaattgatgtgttcaatgcaacatcctccatcatggttaatacattggtttaacttatacacaaaattaaacaacatattaacacagtatcgatcaaatgaggtaaaaaaccatgggtttacattgatagataatcaaactcttagtggatttcaatttattttgaaccaatatggttgtatagtttatcataaggaactcaaaagaattactgtgacaacctataatcaattcttgacatggaaagatattagccttagtagattaaatgtttgtttaattacatggattagtaactgcttgaacacattaaataaaagcttaggcttaagatgcggattcaataatgttatcttgacacaactattcctttatggagattgtatactaaagctatttcacaatgaggggttctacataataaaagaggtagagggatttattatgtctctaattttaaatataacagaagaagatcaattcagaaaacgattttataatagtatgctcaacaacatcacagatgctgctaataaagctcagaaaaatctgctatcaagagtatgtcatacattattagataagacagtgtccgataatataataaatggcagatggataattctattaagtaagttccttaaattaattaagcttgcaggtgacaataaccttaacaatctgagtgaactatattttttgttcagaatatttggacacccaatggtagatgaaagacaagccatggatgctgttaaaattaattgcaatgagaccaaattttacttgttaagcagtctgagtatgttaagaggtgcctttatatatagaattataaaagggtttgtaaataattacaacagatggcctactttaagaaatgctattgttttacccttaagatggttaacttactataaactaaacacttatccttctttgttggaacttacagaaagagatttgattgtgttatcaggactacgtttctatcgtgagtttcggttgcctaaaaaagtggatcttgaaatgattataaatgataaagctatatcacctcctaaaaatttgatatggactagtttccctagaaattacatgccatcacacatacaaaactatatagaacatgaaaaattaaaattttccgagagtgataaatcaagaagagtattagagtattatttaagagataacaaattcaatgaatgtgatttatacaactgtgtagttaatcaaagttatctcaacaaccctaatcatgtggtatcattgacaggcaaagaaagagaactcagtgtaggtagaatgtttgcaatgcaaccgggaatgttcagacaggttcaaatattggcagagaaaatgatagctgaaaacattttacaattctttcctgaaagtcttacaagatatggtgatctagaactacaaaaaatattagaattgaaagcaggaataagtaacaaatcaaatcgctacaatgataattacaacaattacattagtaagtgctctatcatcacagatctcagcaaattcaatcaagcatttcgatatgaaacgtcatgtatttgtagtgatgtgctggatgaactgcatggtgtacaatctctattttcctggttacatttaactattcctcatgtcacaataatatgcacatataggcatgcacccccctatataggagatcatattgtagatcttaacaatgtagatgaacaaagtggattatatagatatcacatgggtggcatcgaagggtggtgtcaaaaactgtggaccatagaagctatatcactattggatctaatatctctcaaagggaaattctcaattactgctttaattaatggtgacaatcaatcaatagatataagcaaaccaatcagactcatggaaggtcaaactcatgctcaagcagattatttgctagcattaaatagccttaaattactgtataaagagtatgcaggcataggccacaaattaaaaggaactgagacttatatatcacgagatatgcaatttatgagtaaaacaattcaacataacggtgtatattacccagctagtataaagaaagtcctaagagtgggaccgtggataaacactatacttgatgatttcaaagtgagtctagaatctataggtagtttgacacaagaattagaatatagaggtgaaagtctattatgcagtttaatatttagaaatgtatggttatataatcagattgctctacaattaaaaaatcatgcattatgtaacaataaactatatttggacatattaaaggttctgaaacacttaaaaaccttttttaatcttgataatattgatacagcattaacattgtatatgaatttacccatgttatttggtggtggtgatcccaacttgttatatcgaagtttctatagaagaactcctgacttcctcacagaggctatagttcactctgtgttcatacttagttattatacaaaccatgacttaaaagataaacttcaagatctgtcagatgatagattgaataagttcttaacatgcataatcacgtttgacaaaaaccctaatgctgaattcgtaacattgatgagagatcctcaagctttagggtctgagagacaagctaaaattactagcgaaatcaatagactggcagttacagaggttttgagtacagctccaaacaaaatattctccaaaagtgcacaacattatactactacagagatagatctaaatgatattatgcaaaatatagaacctacatatcctcatgggctaagagttgtttatgaaagtttacccttttataaagcagagaaaatagtaaatcttatatcaggtacaaaatctataactaacatactggaaaaaacttctgccatagacttaacagatattgatagagccactgagatgatgaggaaaaacataactttgcttataaggatacttccattggattgtaacagagataaaagagagatattgagtatggaaaacctaagtattactgaattaagcaaatatgttagggaaagatcttggtctttatccaatatagttggtgttacatcacccagtatcatgtatacaatggacatcaaatatactacaagcactatatctagtggcataattatagagaaatataatgttaacagtttaacacgtggtgagagaggacccactaaaccatgggttggttcatctacacaagagaaaaaaacaatgccagtttataatagacaagtcttaaccaaaaaacagagagatcaaatagatctattagcaaaattggattgggtgtatgcatctatagataacaaggatgaattcatggaagaactcagcataggaacccttgggttaacatatgaaaaggccaagaaattatttccacaatatttaagtgtcaattatttgcatcgccttacagtcagtagtagaccatgtgaattccctgcatcaataccagcttatagaacaacaaattatcactttgacactagccctattaatcgcatattaacagaaaagtatggtgatgaagatattgacatagtattccaaaactgtataagctttggccttagtttaatgtcagtagtagaacaatttactaatgtatgtcctaacagaattattctcatacctaagcttaatgagatacatttgatgaaacctcccatattcacaggtgatgttgatattcacaagttaaaacaagtgatacaaaaacagcatatgtttttaccagacaaaataagtttgactcaatatgtggaattattcttaagtaataaaacactcaaatctggatctcatgttaattctaatttaatattggcacataaaatatctgactattttcataatacttacattttaagtactaatttagctggacattggattctgattatacaacttatgaaagattctaaaggtatttttgaaaaagattggggagagggatatataactgatcatatgtttattaatttgaaagttttcttcaatgcttataagacctatctcttgtgttttcataaaggttatggcaaagcaaagctggagtgtgatatgaacacttcagatcttctatgtgtattggaattaatagacagtagttattggaagtctatgtctaaggtatttttagaacaaaaagttatcaaatacattcttagccaagatgcaagtttacatagagtaaaaggatgtcatagcttcaaattatggtttcttaaacgtcttaatgtagcagaattcacagtttgcccttgggttgttaacatagattatcatccaacacatatgaaagcaatattaacttatatagatcttgttagaatgggattgataaatatagatagaatacacattaaaaataaacacaaattcaatgatgaattttatacttctaatctcttctacattaattataacttctcagataatactcatctattaactaaacatataaggattgctaattctgaattagaaaataattacaacaaattatatcatcctacaccagaaaccctagagaatatactagccaatccgattaaaagtaatgacaaaaagacactgaatgactattgtataggtaaaaatgttgactcaataatgttaccattgttatctaataagaagcttattaaatcgtctgcaatgattagaaccaattacagcaaacaagatttgtataatttattccctatggttgtgattgatagaattatagatcattcaggcaatacagccaaatccaaccaactttacactactacttcccaccaaatatctttagtgcacaatagcacatcactttactgcatgcttccttggcatcatattaatagattcaattttgtatttagttctacaggttgtaaaattagtatagagtatattttaaaagatcttaaaattaaagatcccaattgtatagcattcataggtgaaggagcagggaatttattattgcgtacagtagtggaacttcatcctgacataagatatatttacagaagtctgaaagattgcaatgatcatagtttacctattgagtttttaaggctgtacaatggacatatcaacattgattatggtgaaaatttgaccattcctgctacagatgcaaccaacaacattcattggtcttatttacatataaagtttgctgaacctatcagtctttttgtctgtgatgccgaattgtctgtaacagtcaactggagtaaaattataatagaatggagcaagcatgtaagaaagtgcaagtactgttcctcagttaataaatgtatgttaatagtaaaatatcatgctcaagatgatattgatttcaaattagacaatataactatattaaaaacttatgtatgcttaggcagtaagttaaagggatcggaggtttacttagtccttacaataggtcctgcgaatatattcccagtatttaatgtagtacaaaatgctaaattgatactatcaagaaccaaaaatttcatcatgcctaagaaagctgataaagagtctattgatgcaaatattaaaagtttgataccctttctttgttaccctataacaaaaaaaggaattaatactgcattgtcaaaactaaagagtgttgttagtggagatatactatcatattctatagctggacgtaatgaagttttcagcaataaacttataaatcataagcatatgaacatcttaaaatggttcaatcatgttttaaatttcagatcaacagaactaaactataaccatttatatatggtagaatctacatatccttacctaagtgaattgttaaacagcttgacaaccaatgaacttaaaaaactgattaaaatcacaggtagtctgttatacaactttcataatgaataatgaataaagatcttataataaaaattcccatagctatacactaacactgtattcaattatagttattaaaaattaaaaatcgtacgattttttaaataacttttagtgaactaatcctaaagttatcattttaatcttggaggaataaatttaaaccctaatctaattggtttatatgtgtattaactaaattacgagatattagtttttgacactttttttctcgt

SEQ ID NO: 17 - DNA, 15887 bp, Artificial Sequence
  Description of Artificial Sequence: Synthetic polynucleotide
acgcgaaaaaatgcgtacaacaaacttgcataaaccaaaaaaatggggcaaataagaatttgataagtaccacttaaatttaactcccttgcttagcgatgggttcgaattcgctatcgatgataaaagtacgtctacaaaatctatttgataatgatgaagtagcgctactaaaaataacgtgttatacggataaactaatacatctaacgaatgcgctagcgaaagcggtaatacatacgataaaactaaatggtatagtatttgtacatgtaataacgtcgtcggatatatgtccgaataataatatagtagtaaaatcgaattttacgacgatgccggtactacaaaatggtggttatatatgggaaatgatggaactaacgcattgttcgcaaccgaatggtctactagatgataattgtgaaataaaattttcgaaaaaactatcggattcgacgatgacgaattatatgaatcaactatcggaactactaggttttgatctaaatccgtaaattataattaatatcaactagcaaatcaatgtcactaacaccattagttaatataaaacttaacagaagacaaaaatggggcaaataaatcaattcagccaacccaaccatggatacgacgcataatgataatacgccgcaacgtctaatgataacggatatgcgtccgctatcgctagaaacgataataacgtcgctaacgcgtgatataataacgcataaatttatatatctaataaatcatgaatgtatagtacgtaaactagatgaacgtcaagcgacgtttacgtttctagtaaattatgaaatgaaactactacataaagtaggttcgacgaaatataaaaaatatacggaatataatacgaaatatggtacgtttccgatgccgatatttataaatcatgatggttttctagaatgtataggtataaaaccgacgaaacatacgccgataatatataaatatgatctaaatccgtaaatttcaacacaatattcacacaatctaaaacaacaactctatgcataactatactccatagtccagatggagcctgaaaattatagtaatttaaaattaaggagagatataagatagaagatggggcaaatacaaagatggctcttagcaaagtcaagttgaatgatacactcaacaaagatcaacttctgtcatccagcaaatacaccatccaacggagcacaggagatagtattgatactcctaattatgatgtgcagaaacacatcaataagttatgtggcatgttattaatcacagaagatgctaatcataaattcactgggttaataggtatgttatatgcgatgtctaggttaggaagagaagacaccataaaaatactcagagatgcgggatatcatgtaaaagcaaatggagtagatgtaacaacacatcgtcaagacattaatggaaaagaaatgaaatttgaagtgttaacattggcaagcttaacaactgaaattcaaatcaacattgagatagaatctagaaaatcctacaaaaaaatgctaaaagaaatgggagaggtagctccagaatacaggcatgactctcctgattgtgggatgataatattatgtatagcagcattagtaataactaaattagcagcaggggacagatctggtcttacagccgtgattaggagagctaataatgtcctaaaaaatgaaatgaaacgttacaaaggcttactacccaaggacatagccaacagcttctatgaagtgtttgaaaaacatccccactttatagatgtttttgttcattttggtatagcacaatcttctaccagaggtggcagtagagttgaagggatttttgcaggattgtttatgaatgcctatggtgcagggcaagtgatgttacggtggggagtcttagcaaaatcagttaaaaatattatgttaggacatgctagtgtgcaagcagaaatggaacaagttgttgaggtttatgaatatgcccaaaaattgggtggtgaagcaggattctaccatatattgaacaacccaaaagcatcattattatctttgactcaatttcctcacttctccagtgtagtattaggcaatgctgctggcctaggcataatgggagagtacagaggtacaccgaggaatcaagatctatatgatgcagcaaaggcatatgctgaacaactcaaagaaaatggtgtgattaactacagtgtactagacttgacagcagaagaactagaggctatcaaacatcagcttaatccaaaagataatgatgtagagctttgagttaataaaaaatggggcaaataaatcatcatggaaaagtttgctcctgaattccatggagaagatgcaaacaacagggctactaaattcctagaatcaataaagggcaaattcacatcacccaaagatcccaagaaaaaagatagtatcatatctgtcaactcaatagatatagaagtaaccaaagaaagccctataacatcaaattcaactattatcaacccaacaaatgagacagatgatactgcagggaacaagcccaattatcaaagaaaacctctagtaagtttcaaagaagaccctacaccaagtgataatcccttttctaaactatacaaagaaaccatagaaacatttgataacaatgaagaagaatccagctattcatacgaagaaataaatgatcagacaaacgataatataacagcaagattagataggattgatgaaaaattaagtgaaatactaggaatgcttcacacattagtagtggcaagtgcaggacctacatctgctcgggatggtataagagatgccatgattggtttaagagaagaaatgatagaaaaaatcagaactgaagcattaatgaccaatgacagattagaagctatggcaagactcaggaatgaggaaagtgaaaagatggcaaaagacacatcagatgaagtgtctctcaatccaacatcagagaaattgaacaacctattggaagggaatgatagtgacaatgatctatcacttgaagatttctgattagttaccactcttcacatcaacacacaataccaacagaagaccaacaaactaaccaacccaatcatccaaccaaacatccatccgccaatcagccaaacagccaacaaaacaaccagccaatccaaaactaaccacccggaaaaaatctataatatagttacaaaaaaaggaaagggtggggcaaatatggaaacatacgtgaacaagcttcacgaaggctccacatacacagctgctgttcaatacaatgtcttagaaaaagacgatgaccctgcatcacttacaatatgggtgcccatgttccaatcatctatgccagcagatttacttataaaagaactagctaatgtcaacatactagtgaaacaaatatccacacccaagggaccttcactaagagtcatgataaactcaagaagtgcagtgctagcacaaatgcccagcaaatttaccatatgcgctaatgtgtccttggatgaaagaagcaaactagcatatgatgtaaccacaccctgtgaaatcaaggcatgtagtctaacatgcctaaaatcaaaaaatatgttgactacagttaaagatctcactatgaagacactcaaccctacacatgatattattgctttatgtgaatttgaaaacatagtaacatcaaaaaaagtcataataccaacatacctaagatccatcagtgtcagaaataaagatctgaacacacttgaaaatataacaaccactgaattcaaaaatgctatcacaaatgcaaaaatcatcccttactcaggattactattagtcatcacagtgactgacaacaaaggagcattcaaatacataaagccacaaagtcaattcatagtagatcttggagcttacctagaaaaagaaagtatatattatgttaccacaaattggaagcacacagctacacgatttgcaatcaaacccatggaagattaacctttttcctctacatcagtgtgttaattcatacaaactttctacctacattcttcacttcaccatcacaatcacaaacactctgtggttcaaccaatcaaacaaaacttatctgaagtcccagatcatcccaagtcattgtttatcagatctagtactcaaataagttaataaaaaatatacacatggacgtccatggggcaaatgcaaacatgtttgtttttcttgttttattgccactagtctctagtcagtgtgttaatcttacaaccagaactcaattaccccctgcatacactaattctttcacacgtggtgtttattaccctgacaaagttttcagatcctcagttttacattcaactcaggacttgttcttacctttcttttccaatgttacttggttccatgctatacatgtctctgggaccaatggtactaagaggtttgataaccctgtcctaccatttaatgatggtgtttattttgcttccactgagaagtctaacataataagaggctggatttttggtactactttagattcgaagacccagtccctacttattgttaataacgctactaatgttgttattaaagtctgtgaatttcaattttgtaatgatccatttttgggtgtttattaccacaaaaacaacaaaagttggatggaaagtgagttcagagtttattctagtgcgaataattgcacttttgaatatgtctctcagccttttcttatggaccttgaaggaaaacagggtaatttcaaaaatcttagggaatttgtgtttaagaatattgatggttattttaaaatatattctaagcacacgcctattaatttagtgcgtgatctccctcagggtttttcggctttagaaccattggtagatttgccaataggtattaacatcactaggtttcaaactttacttgctttacatagaagttatttgactcctggtgattcttcttcaggttggacagctggtgctgcagcttattatgtgggttatcttcaacctaggacttttctattaaaatataatgaaaatggaaccattacagatgctgtagactgtgcacttgaccctctctcagaaacaaagtgtacgttgaaatccttcactgtagaaaaaggaatctatcaaacttctaactttagagtccaaccaacagaatctattgttagatttcctaatattacaaacttgtgcccttttggtgaagtttttaacgccaccagatttgcatctgtttatgcttggaacaggaagagaatcagcaactgtgttgctgattattctgtcctatataattccgcatcattttccacttttaagtgttatggagtgtctcctactaaattaaatgatctctgctttactaatgtctatgcagattcatttgtaattagaggtgatgaagtcagacaaatcgctccagggcaaactggaaagattgctgattataattataaattaccagatgattttacaggctgcgttatagcttggaattctaacaatcttgattctaaggttggtggtaattataattacctgtatagattgtttaggaagtctaatctcaaaccttttgagagagatatttcaactgaaatctatcaggccggtagcacaccttgtaatggtgttgaaggttttaattgttactttcctttacaatcatatggtttccaacccactaatggtgttggttaccaaccatacagagtagtagtactttcttttgaacttctacatgcaccagcaactgtttgtggacctaaaaagtctactaatttggttaaaaacaaatgtgtcaatttcaacttcaatggtttaacaggcacaggtgttcttactgagtctaacaaaaagtttctgcctttccaacaatttggcagagacattgctgacactactgatgctgtccgtgatccacagacacttgagattcttgacattacaccatgttcttttggtggtgtcagtgttataacaccaggaacaaatacttctaaccaggttgctgttctttatcaggatgttaactgcacagaagtccctgttgctattcatgcagatcaacttactcctacttggcgtgtttattctacaggttctaatgtttttcaaacacgtgcaggctgtttaataggggctgaacatgtcaacaactcatatgagtgtgacatacccattggtgcaggtatatgcgctagttatcagactcagactaattctcctcggcgggcacgtagtgtagctagtcaatccatcattgcctacactatgtcacttggtgcagaaaattcagttgcttactctaataactctattgccatacccacaaattttactattagtgttaccacagaaattctaccagtgtctatgaccaagacatcagtagattgtacaatgtacatttgtggtgattcaactgaatgcagcaatcttttgttgcaatatggcagtttttgtacacaattaaaccgtgctttaactggaatagctgttgaacaagacaaaaacacccaagaagtttttgcacaagtcaaacaaatttacaaaacaccaccaattaaagattttggtggttttaatttttcacaaatattaccagatccatcaaaaccaagcaagaggtcatttattgaagatctacttttcaacaaagtgacacttgcagatgctggcttcatcaaacaatatggtgattgccttggtgatattgctgctagagacctcatttgtgcacaaaagtttaacggccttactgttttgccacctttgctcacagatgaaatgattgctcaatacacttctgcactgttagcgggtacaatcacttctggttggacctttggtgcaggtgctgcattacaaataccatttgctatgcaaatggcttataggtttaatggtattggagttacacagaatgttctctatgagaaccaaaaattgattgccaaccaatttaatagtgctattggcaaaattcaagactcactttcttccacagcaagtgcacttggaaaacttcaagatgtggtcaaccaaaatgcacaagctttaaacacgcttgttaaacaacttagctccaattttggtgcaatttcaagtgttttaaatgatatcctttcacgtcttgacaaagttgaggctgaagtgcaaattgataggttgatcacaggcagacttcaaagtttgcagacatatgtgactcaacaattaattagagctgcagaaatcagagcttctgctaatcttgctgctactaaaatgtcagagtgtgtacttggacaatcaaaaagagttgatttttgtggaaagggctatcatcttatgtccttccctcagtcagcacctcatggtgtagtcttcttgcatgtgacttatgtccctgcacaagaaaagaacttcacaactgctcctgccatttgtcatgatggaaaagcacactttcctcgtgaaggtgtctttgtttcaaatggcacacactggtttgtaacacaaaggaatttttatgaaccacaaatcattactacagacaacacatttgtgtctggtaactgtgatgttgtaataggaattgtcaacaacacagtttatgatcctttgcaacctgaattagactcattcaaggaggagttagataaatattttaagaatcatacatcaccagatgttgatttaggtgacatctctggcattaatgcttcagttgtaaacattcaaaaagaaattgaccgcctcaatgaggttgccaagaatttaaatgaatctctcatcgatctccaagaacttggaaagtatgagcagtatataaaatggccatggtacatttggctaggttttatagctggcttgattgccatagtaatggtgacaattatgctttgctgtatgaccagttgctgtagttgtctcaaggccagaagcacaccaatcacactaagcaaggatcaactgagtggtataaataatattgcatttagtaactaaataaaaatagcacctaatcatgttcttacaatggtttactatctgctcatagacaacccatctatcattggattttcttaaaatctgaacttcatcgaaactcttatctataaaccatctcacttacactatttaagtagattcctagtttatagttatataaaacacaattgaatgccagtcgaccttaccatctgtaaaaatgaaaactggggcaaatatgtcacgaaggaatccttgcaaatttgaaattcgaggtcattgcttaaatggtaagaggtgtcattttagtcataattattttgaatggccaccccatgcactgcttgtaagacaaaactttatgttaaacagaatacttaagtctatggataaaagtatagataccttatcagaaataagtggagctgcagagttggacagaacagaagagtatgctcttggtgtagttggagtgctagagagttatataggatcaataaacaatataactaaacaatcagcatgtgttgccatgagcaaactcctcactgaactcaatagtgatgatatcaaaaagctgagggacaatgaagagctaaattcacccaagataagagtgtacaatactgtcatatcatatattgaaagcaacaggaaaaacaataaacaaactatccatctgttaaaaagattgccagcagacgtattgaagaaaaccatcaaaaacacattggatatccataagagcataaccatcaacaacccaaaagaatcaactgttagtgatacaaatgaccatgccaaaaataatgatactacctgacaaatatccttgtagtataacttccatactaataacaagtagatgtagagttactatgtataatcaaaagaacacactatatttcaatcaaaacaacccaaataaccatatgtactcaccgaatcaaacattcaatgaaatccattggacctctcaagaattgattgacacaattcaaaattttctacaacatctaggtattattgaggatatatatacaatatatatattagtgtcataacactcaattctaacactcaccacatcgttacattattaattcaaacaattcaagttgtgggacaaaatggatcccattattaatggaaattctgctaatgtttatctaaccgatagttatttaaaaggtgttatctctttctcagagtgtaatgctttaggaagttacatattcaatggtccttatctcaaaaatgattataccaacttaattagtagacaaaatccattaatagaacacatgaatctaaagaaactaaatataacacagtccttaatatctaagtatcataaaggtgaaataaaattagaagaacctacttattttcagtcattacttatgacatacaagagtatgacctcgtcagaacagattgctaccactaatttacttaaaaagataataagaagagctatagaaataagtgatgtcaaagtctatgctatattgaataaactagggcttaaagaaaaggacaagattaaatccaacaatggacaagatgaagacaactcagttattacgaccataatcaaagatgatatactttcagctgttaaagataatcaatctcatcttaaagcagacaaaaatcactctacaaaacaaaaagacacaatcaaaacaacactcttgaagaaattgatgtgttcaatgcaacatcctccatcatggttaatacattggtttaacttatacacaaaattaaacaacatattaacacagtatcgatcaaatgaggtaaaaaaccatgggtttacattgatagataatcaaactcttagtggatttcaatttattttgaaccaatatggttgtatagtttatcataaggaactcaaaagaattactgtgacaacctataatcaattcttgacatggaaagatattagccttagtagattaaatgtttgtttaattacatggattagtaactgcttgaacacattaaataaaagcttaggcttaagatgcggattcaataatgttatcttgacacaactattcctttatggagattgtatactaaagctatttcacaatgaggggttctacataataaaagaggtagagggatttattatgtctctaattttaaatataacagaagaagatcaattcagaaaacgattttataatagtatgctcaacaacatcacagatgctgctaataaagctcagaaaaatctgctatcaagagtatgtcatacattattagataagacagtgtccgataatataataaatggcagatggataattctattaagtaagttccttaaattaattaagcttgcaggtgacaataaccttaacaatctgagtgaactatattttttgttcagaatatttggacacccaatggtagatgaaagacaagccatggatgctgttaaaattaattgcaatgagaccaaattttacttgttaagcagtctgagtatgttaagaggtgcctttatatatagaattataaaagggtttgtaaataattacaacagatggcctactttaagaaatgctattgttttacccttaagatggttaacttactataaactaaacacttatccttctttgttggaacttacagaaagagatttgattgtgttatcaggactacgtttctatcgtgagtttcggttgcctaaaaaagtggatcttgaaatgattataaatgataaagctatatcacctcctaaaaatttgatatggactagtttccctagaaattacatgccatcacacatacaaaactatatagaacatgaaaaattaaaattttccgagagtgataaatcaagaagagtattagagtattatttaagagataacaaattcaatgaatgtgatttatacaactgtgtagttaatcaaagttatctcaacaaccctaatcatgtggtatcattgacaggcaaagaaagagaactcagtgtaggtagaatgtttgcaatgcaaccgggaatgttcagacaggttcaaatattggcagagaaaatgatagctgaaaacattttacaattctttcctgaaagtcttacaagatatggtgatctagaactacaaaaaatattagaattgaaagcaggaataagtaacaaatcaaatcgctacaatgataattacaacaattacattagtaagtgctctatcatcacagatctcagcaaattcaatcaagcatttcgatatgaaacgtcatgtatttgtagtgatgtgctggatgaactgcatggtgtacaatctctattttcctggttacatttaactattcctcatgtcacaataatatgcacatataggcatgcacccccctatataggagatcatattgtagatcttaacaatgtagatgaacaaagtggattatatagatatcacatgggtggcatcgaagggtggtgtcaaaaactgtggaccatagaagctatatcactattggatctaatatctctcaaagggaaattctcaattactgctttaattaatggtgacaatcaatcaatagatataagcaaaccaatcagactcatggaaggtcaaactcatgctcaagcagattatttgctagcattaaatagccttaaattactgtataaagagtatgcaggcataggccacaaattaaaaggaactgagacttatatatcacgagatatgcaatttatgagtaaaacaattcaacataacggtgtatattacccagctagtataaagaaagtcctaagagtgggaccgtggataaacactatacttgatgatttcaaagtgagtctagaatctataggtagtttgacacaagaattagaatatagaggtgaaagtctattatgcagtttaatatttagaaatgtatggttatataatcagattgctctacaattaaaaaatcatgcattatgtaacaataaactatatttggacatattaaaggttctgaaacacttaaaaaccttttttaatcttgataatattgatacagcattaacattgtatatgaatttacccatgttatttggtggtggtgatcccaacttgttatatcgaagtttctatagaagaactcctgacttcctcacagaggctatagttcactctgtgttcatacttagttattatacaaaccatgacttaaaagataaacttcaagatctgtcagatgatagattgaataagttcttaacatgcataatcacgtttgacaaaaaccctaatgctgaattcgtaacattgatgagagatcctcaagctttagggtctgagagacaagctaaaattactagcgaaatcaatagactggcagttacagaggttttgagtacagctccaaacaaaatattctccaaaagtgcacaacattatactactacagagatagatctaaatgatattatgcaaaatatagaacctacatatcctcatgggctaagagttgtttatgaaagtttacccttttataaagcagagaaaatagtaaatcttatatcaggtacaaaatctataactaacatactggaaaaaacttctgccatagacttaacagatattgatagagccactgagatgatgaggaaaaacataactttgcttataaggatacttccattggattgtaacagagataaaagagagatattgagtatggaaaacctaagtattactgaattaagcaaatatgttagggaaagatcttggtctttatccaatatagttggtgttacatcacccagtatcatgtatacaatggacatcaaatatactacaagcactatatctagtggcataattatagagaaatataatgttaacagtttaacacgtggtgagagaggacccactaaaccatgggttggttcatctacacaagagaaaaaaacaatgccagtttataatagacaagtcttaaccaaaaaacagagagatcaaatagatctattagcaaaattggattgggtgtatgcatctatagataacaaggatgaattcatggaagaactcagcataggaacccttgggttaacatatgaaaaggccaagaaattatttccacaatatttaagtgtcaattatttgcatcgccttacagtcagtagtagaccatgtgaattccctgcatcaataccagcttatagaacaacaaattatcactttgacactagccctattaatcgcatattaacagaaaagtatggtgatgaagatattgacatagtattccaaaactgtataagctttggccttagtttaatgtcagtagtagaacaatttactaatgtatgtcctaacagaattattctcatacctaagcttaatgagatacatttgatgaaacctcccatattcacaggtgatgttgatattcacaagttaaaacaagtgatacaaaaacagcatatgtttttaccagacaaaataagtttgactcaatatgtggaattattcttaagtaataaaacactcaaatctggatctcatgttaattctaatttaatattggcacataaaatatctgactattttcataatacttacattttaagtactaatttagctggacattggattctgattatacaacttatgaaagattctaaaggtatttttgaaaaagattggggagagggatatataactgatcatatgtttattaatttgaaagttttcttcaatgcttataagacctatctcttgtgttttcataaaggttatggcaaagcaaagctggagtgtgatatgaacacttcagatcttctatgtgtattggaattaatagacagtagttattggaagtctatgtctaaggtatttttagaacaaaaagttatcaaatacattcttagccaagatgcaagtttacatagagtaaaaggatgtcatagcttcaaattatggtttcttaaacgtcttaatgtagcagaattcacagtttgcccttgggttgttaacatagattatcatccaacacatatgaaagcaatattaacttatatagatcttgttagaatgggattgataaatatagatagaatacacattaaaaataaacacaaattcaatgatgaattttatacttctaatctcttctacattaattataacttctcagataatactcatctattaactaaacatataaggattgctaattctgaattagaaaataattacaacaaattatatcatcctacaccagaaaccctagagaatatactagccaatccgattaaaagtaatgacaaaaagacactgaatgactattgtataggtaaaaatgttgactcaataatgttaccattgttatctaataagaagcttattaaatcgtctgcaatgattagaaccaattacagcaaacaagatttgtataatttattccctatggttgtgattgatagaattatagatcattcaggcaatacagccaaatccaaccaactttacactactacttcccaccaaatatctttagtgcacaatagcacatcactttactgcatgcttccttggcatcatattaatagattcaattttgtatttagttctacaggttgtaaaattagtatagagtatattttaaaagatcttaaaattaaagatcccaattgtatagcattcataggtgaaggagcagggaatttattattgcgtacagtagtggaacttcatcctgacataagatatatttacagaagtctgaaagattgcaatgatcatagtttacctattgagtttttaaggctgtacaatggacatatcaacattgattatggtgaaaatttgaccattcctgctacagatgcaaccaacaacattcattggtcttatttacatataaagtttgctgaacctatcagtctttttgtctgtgatgccgaattgtctgtaacagtcaactggagtaaaattataatagaatggagcaagcatgtaagaaagtgcaagtactgttcctcagttaataaatgtatgttaatagtaaaatatcatgctcaagatgatattgatttcaaattagacaatataactatattaaaaacttatgtatgcttaggcagtaagttaaagggatcggaggtttacttagtccttacaataggtcctgcgaatatattcccagtatttaatgtagtacaaaatgctaaattgatactatcaagaaccaaaaatttcatcatgcctaagaaagctgataaagagtctattgatgcaaatattaaaagtttgataccctttctttgttaccctataacaaaaaaaggaattaatactgcattgtcaaaactaaagagtgttgttagtggagatatactatcatattctatagctggacgtaatgaagttttcagcaataaacttataaatcataagcatatgaacatcttaaaatggttcaatcatgttttaaatttcagatcaacagaactaaactataaccatttatatatggtagaatctacatatccttacctaagtgaattgttaaacagcttgacaaccaatgaacttaaaaaactgattaaaatcacaggtagtctgttatacaactttcataatgaataatgaataaagatcttataataaaaattcccatagctatacactaacactgtattcaattatagttattaaaaattaaaaatcgtacgattttttaaataacttttagtgaactaatcctaaagttatcattttaatcttggaggaataaatttaaaccctaatctaattggtttatatgtgtattaactaaattacgagatattagtttttgacactttttttctcgt

SEQ ID NO: 18 - DNA, 15896 bp, Artificial Sequence
  Description of Artificial Sequence: Synthetic polynucleotide
acgcgaaaaaatgcgtacaacaaacttgcataaaccaaaaaaatggggcaaataagaatttgataagtaccacttaaatttaactcccttgcttagcgatgggttcgaattcgctatcgatgataaaagtacgtctacaaaatctatttgataatgatgaagtagcgctactaaaaataacgtgttatacggataaactaatacatctaacgaatgcgctagcgaaagcggtaatacatacgataaaactaaatggtatagtatttgtacatgtaataacgtcgtcggatatatgtccgaataataatatagtagtaaaatcgaattttacgacgatgccggtactacaaaatggtggttatatatgggaaatgatggaactaacgcattgttcgcaaccgaatggtctactagatgataattgtgaaataaaattttcgaaaaaactatcggattcgacgatgacgaattatatgaatcaactatcggaactactaggttttgatctaaatccgtaaattataattaatatcaactagcaaatcaatgtcactaacaccattagttaatataaaacttaacagaagacaaaaatggggcaaataaatcaattcagccaacccaaccatggatacgacgcataatgataatacgccgcaacgtctaatgataacggatatgcgtccgctatcgctagaaacgataataacgtcgctaacgcgtgatataataacgcataaatttatatatctaataaatcatgaatgtatagtacgtaaactagatgaacgtcaagcgacgtttacgtttctagtaaattatgaaatgaaactactacataaagtaggttcgacgaaatataaaaaatatacggaatataatacgaaatatggtacgtttccgatgccgatatttataaatcatgatggttttctagaatgtataggtataaaaccgacgaaacatacgccgataatatataaatatgatctaaatccgtaaatttcaacacaatattcacacaatctaaaacaacaactctatgcataactatactccatagtccagatggagcctgaaaattatagtaatttaaaattaaggagagatataagatagaagatggggcaaatacaaagatggctcttagcaaagtcaagttgaatgatacactcaacaaagatcaacttctgtcatccagcaaatacaccatccaacggagcacaggagatagtattgatactcctaattatgatgtgcagaaacacatcaataagttatgtggcatgttattaatcacagaagatgctaatcataaattcactgggttaataggtatgttatatgcgatgtctaggttaggaagagaagacaccataaaaatactcagagatgcgggatatcatgtaaaagcaaatggagtagatgtaacaacacatcgtcaagacattaatggaaaagaaatgaaatttgaagtgttaacattggcaagcttaacaactgaaattcaaatcaacattgagatagaatctagaaaatcctacaaaaaaatgctaaaagaaatgggagaggtagctccagaatacaggcatgactctcctgattgtgggatgataatattatgtatagcagcattagtaataactaaattagcagcaggggacagatctggtcttacagccgtgattaggagagctaataatgtcctaaaaaatgaaatgaaacgttacaaaggcttactacccaaggacatagccaacagcttctatgaagtgtttgaaaaacatccccactttatagatgtttttgttcattttggtatagcacaatcttctaccagaggtggcagtagagttgaagggatttttgcaggattgtttatgaatgcctatggtgcagggcaagtgatgttacggtggggagtcttagcaaaatcagttaaaaatattatgttaggacatgctagtgtgcaagcagaaatggaacaagttgttgaggtttatgaatatgcccaaaaattgggtggtgaagcaggattctaccatatattgaacaacccaaaagcatcattattatctttgactcaatttcctcacttctccagtgtagtattaggcaatgctgctggcctaggcataatgggagagtacagaggtacaccgaggaatcaagatctatatgatgcagcaaaggcatatgctgaacaactcaaagaaaatggtgtgattaactacagtgtactagacttgacagcagaagaactagaggctatcaaacatcagcttaatccaaaagataatgatgtagagctttgagttaataaaaaatggggcaaataaatcatcatggaaaagtttgctcctgaattccatggagaagatgcaaacaacagggctactaaattcctagaatcaataaagggcaaattcacatcacccaaagatcccaagaaaaaagatagtatcatatctgtcaactcaatagatatagaagtaaccaaagaaagccctataacatcaaattcaactattatcaacccaacaaatgagacagatgatactgcagggaacaagcccaattatcaaagaaaacctctagtaagtttcaaagaagaccctacaccaagtgataatcccttttctaaactatacaaagaaaccatagaaacatttgataacaatgaagaagaatccagctattcatacgaagaaataaatgatcagacaaacgataatataacagcaagattagataggattgatgaaaaattaagtgaaatactaggaatgcttcacacattagtagtggcaagtgcaggacctacatctgctcgggatggtataagagatgccatgattggtttaagagaagaaatgatagaaaaaatcagaactgaagcattaatgaccaatgacagattagaagctatggcaagactcaggaatgaggaaagtgaaaagatggcaaaagacacatcagatgaagtgtctctcaatccaacatcagagaaattgaacaacctattggaagggaatgatagtgacaatgatctatcacttgaagatttctgattagttaccactcttcacatcaacacacaataccaacagaagaccaacaaactaaccaacccaatcatccaaccaaacatccatccgccaatcagccaaacagccaacaaaacaaccagccaatccaaaactaaccacccggaaaaaatctataatatagttacaaaaaaaggaaagggtggggcaaatatggaaacatacgtgaacaagcttcacgaaggctccacatacacagctgctgttcaatacaatgtcttagaaaaagacgatgaccctgcatcacttacaatatgggtgcccatgttccaatcatctatgccagcagatttacttataaaagaactagctaatgtcaacatactagtgaaacaaatatccacacccaagggaccttcactaagagtcatgataaactcaagaagtgcagtgctagcacaaatgcccagcaaatttaccatatgcgctaatgtgtccttggatgaaagaagcaaactagcatatgatgtaaccacaccctgtgaaatcaaggcatgtagtctaacatgcctaaaatcaaaaaatatgttgactacagttaaagatctcactatgaagacactcaaccctacacatgatattattgctttatgtgaatttgaaaacatagtaacatcaaaaaaagtcataataccaacatacctaagatccatcagtgtcagaaataaagatctgaacacacttgaaaatataacaaccactgaattcaaaaatgctatcacaaatgcaaaaatcatcccttactcaggattactattagtcatcacagtgactgacaacaaaggagcattcaaatacataaagccacaaagtcaattcatagtagatcttggagcttacctagaaaaagaaagtatatattatgttaccacaaattggaagcacacagctacacgatttgcaatcaaacccatggaagattaacctttttcctctacatcagtgtgttaattcatacaaactttctacctacattcttcacttcaccatcacaatcacaaacactctgtggttcaaccaatcaaacaaaacttatctgaagtcccagatcatcccaagtcattgtttatcagatctagtactcaaataagttaataaaaaatatacacatggacgtccatggggcaaatgcaaacatgtttgtttttcttgttttattgccactagtctctagtcagtgtgttaatcttacaaccagaactcaattaccccctgcatacactaattctttcacacgtggtgtttattaccctgacaaagttttcagatcctcagttttacattcaactcaggacttgttcttacctttcttttccaatgttacttggttccatgctatacatgtctctgggaccaatggtactaagaggtttgataaccctgtcctaccatttaatgatggtgtttattttgcttccactgagaagtctaacataataagaggctggatttttggtactactttagattcgaagacccagtccctacttattgttaataacgctactaatgttgttattaaagtctgtgaatttcaattttgtaatgatccatttttgggtgtttattaccacaaaaacaacaaaagttggatggaaagtgagttcagagtttattctagtgcgaataattgcacttttgaatatgtctctcagccttttcttatggaccttgaaggaaaacagggtaatttcaaaaatcttagggaatttgtgtttaagaatattgatggttattttaaaatatattctaagcacacgcctattaatttagtgcgtgatctccctcagggtttttcggctttagaaccattggtagatttgccaataggtattaacatcactaggtttcaaactttacttgctttacatagaagttatttgactcctggtgattcttcttcaggttggacagctggtgctgcagcttattatgtgggttatcttcaacctaggacttttctattaaaatataatgaaaatggaaccattacagatgctgtagactgtgcacttgaccctctctcagaaacaaagtgtacgttgaaatccttcactgtagaaaaaggaatctatcaaacttctaactttagagtccaaccaacagaatctattgttagatttcctaatattacaaacttgtgcccttttggtgaagtttttaacgccaccagatttgcatctgtttatgcttggaacaggaagagaatcagcaactgtgttgctgattattctgtcctatataattccgcatcattttccacttttaagtgttatggagtgtctcctactaaattaaatgatctctgctttactaatgtctatgcagattcatttgtaattagaggtgatgaagtcagacaaatcgctccagggcaaactggaaagattgctgattataattataaattaccagatgattttacaggctgcgttatagcttggaattctaacaatcttgattctaaggttggtggtaattataattacctgtatagattgtttaggaagtctaatctcaaaccttttgagagagatatttcaactgaaatctatcaggccggtagcacaccttgtaatggtgttgaaggttttaattgttactttcctttacaatcatatggtttccaacccactaatggtgttggttaccaaccatacagagtagtagtactttcttttgaacttctacatgcaccagcaactgtttgtggacctaaaaagtctactaatttggttaaaaacaaatgtgtcaatttcaacttcaatggtttaacaggcacaggtgttcttactgagtctaacaaaaagtttctgcctttccaacaatttggcagagacattgctgacactactgatgctgtccgtgatccacagacacttgagattcttgacattacaccatgttcttttggtggtgtcagtgttataacaccaggaacaaatacttctaaccaggttgctgttctttatcaggatgttaactgcacagaagtccctgttgctattcatgcagatcaacttactcctacttggcgtgtttattctacaggttctaatgtttttcaaacacgtgcaggctgtttaataggggctgaacatgtcaacaactcatatgagtgtgacatacccattggtgcaggtatatgcgctagttatcagactcagactaattctcctcggcgggcacgtagtgtagctagtcaatccatcattgcctacactatgtcacttggtgcagaaaattcagttgcttactctaataactctattgccatacccacaaattttactattagtgttaccacagaaattctaccagtgtctatgaccaagacatcagtagattgtacaatgtacatttgtggtgattcaactgaatgcagcaatcttttgttgcaatatggcagtttttgtacacaattaaaccgtgctttaactggaatagctgttgaacaagacaaaaacacccaagaagtttttgcacaagtcaaacaaatttacaaaacaccaccaattaaagattttggtggttttaatttttcacaaatattaccagatccatcaaaaccaagcaagaggtcatttattgaagatctacttttcaacaaagtgacacttgcagatgctggcttcatcaaacaatatggtgattgccttggtgatattgctgctagagacctcatttgtgcacaaaagtttaacggccttactgttttgccacctttgctcacagatgaaatgattgctcaatacacttctgcactgttagcgggtacaatcacttctggttggacctttggtgcaggtgctgcattacaaataccatttgctatgcaaatggcttataggtttaatggtattggagttacacagaatgttctctatgagaaccaaaaattgattgccaaccaatttaatagtgctattggcaaaattcaagactcactttcttccacagcaagtgcacttggaaaacttcaagatgtggtcaaccaaaatgcacaagctttaaacacgcttgttaaacaacttagctccaattttggtgcaatttcaagtgttttaaatgatatcctttcacgtcttgacaaagttgaggctgaagtgcaaattgataggttgatcacaggcagacttcaaagtttgcagacatatgtgactcaacaattaattagagctgcagaaatcagagcttctgctaatcttgctgctactaaaatgtcagagtgtgtacttggacaatcaaaaagagttgatttttgtggaaagggctatcatcttatgtccttccctcagtcagcacctcatggtgtagtcttcttgcatgtgacttatgtccctgcacaagaaaagaacttcacaactgctcctgccatttgtcatgatggaaaagcacactttcctcgtgaaggtgtctttgtttcaaatggcacacactggtttgtaacacaaaggaatttttatgaaccacaaatcattactacagacaacacatttgtgtctggtaactgtgatgttgtaataggaattgtcaacaacacagtttatgatcctttgcaacctgaattagactcattcaaggaggagttagataaatattttaagaatcatacatcaccagatgttgatttaggtgacatctctggcattaatgcttcagttgtaaacattcaaaaagaaattgaccgcctcaatgaggttgccaagaatttaaatgaatctctcatcgatctccaagaacttggaaagtatgagcagtatataaaatggccatggtacatttggctaggttttatagctggcttgattgccatagtaatggtgacaattatgctttgctgtatgaccagttgctgtagttgtctcaagtactgtaaggccagaagcacaccaatcacactaagcaaggatcaactgagtggtataaataatattgcatttagtaactaaataaaaatagcacctaatcatgttcttacaatggtttactatctgctcatagacaacccatctatcattggattttcttaaaatctgaacttcatcgaaactcttatctataaaccatctcacttacactatttaagtagattcctagtttatagttatataaaacacaattgaatgccagtcgaccttaccatctgtaaaaatgaaaactggggcaaatatgtcacgaaggaatccttgcaaatttgaaattcgaggtcattgcttaaatggtaagaggtgtcattttagtcataattattttgaatggccaccccatgcactgcttgtaagacaaaactttatgttaaacagaatacttaagtctatggataaaagtatagataccttatcagaaataagtggagctgcagagttggacagaacagaagagtatgctcttggtgtagttggagtgctagagagttatataggatcaataaacaatataactaaacaatcagcatgtgttgccatgagcaaactcctcactgaactcaatagtgatgatatcaaaaagctgagggacaatgaagagctaaattcacccaagataagagtgtacaatactgtcatatcatatattgaaagcaacaggaaaaacaataaacaaactatccatctgttaaaaagattgccagcagacgtattgaagaaaaccatcaaaaacacattggatatccataagagcataaccatcaacaacccaaaagaatcaactgttagtgatacaaatgaccatgccaaaaataatgatactacctgacaaatatccttgtagtataacttccatactaataacaagtagatgtagagttactatgtataatcaaaagaacacactatatttcaatcaaaacaacccaaataaccatatgtactcaccgaatcaaacattcaatgaaatccattggacctctcaagaattgattgacacaattcaaaattttctacaacatctaggtattattgaggatatatatacaatatatatattagtgtcataacactcaattctaacactcaccacatcgttacattattaattcaaacaattcaagttgtgggacaaaatggatcccattattaatggaaattctgctaatgtttatctaaccgatagttatttaaaaggtgttatctctttctcagagtgtaatgctttaggaagttacatattcaatggtccttatctcaaaaatgattataccaacttaattagtagacaaaatccattaatagaacacatgaatctaaagaaactaaatataacacagtccttaatatctaagtatcataaaggtgaaataaaattagaagaacctacttattttcagtcattacttatgacatacaagagtatgacctcgtcagaacagattgctaccactaatttacttaaaaagataataagaagagctatagaaataagtgatgtcaaagtctatgctatattgaataaactagggcttaaagaaaaggacaagattaaatccaacaatggacaagatgaagacaactcagttattacgaccataatcaaagatgatatactttcagctgttaaagataatcaatctcatcttaaagcagacaaaaatcactctacaaaacaaaaagacacaatcaaaacaacactcttgaagaaattgatgtgttcaatgcaacatcctccatcatggttaatacattggtttaacttatacacaaaattaaacaacatattaacacagtatcgatcaaatgaggtaaaaaaccatgggtttacattgatagataatcaaactcttagtggatttcaatttattttgaaccaatatggttgtatagtttatcataaggaactcaaaagaattactgtgacaacctataatcaattcttgacatggaaagatattagccttagtagattaaatgtttgtttaattacatggattagtaactgcttgaacacattaaataaaagcttaggcttaagatgcggattcaataatgttatcttgacacaactattcctttatggagattgtatactaaagctatttcacaatgaggggttctacataataaaagaggtagagggatttattatgtctctaattttaaatataacagaagaagatcaattcagaaaacgattttataatagtatgctcaacaacatcacagatgctgctaataaagctcagaaaaatctgctatcaagagtatgtcatacattattagataagacagtgtccgataatataataaatggcagatggataattctattaagtaagttccttaaattaattaagcttgcaggtgacaataaccttaacaatctgagtgaactatattttttgttcagaatatttggacacccaatggtagatgaaagacaagccatggatgctgttaaaattaattgcaatgagaccaaattttacttgttaagcagtctgagtatgttaagaggtgcctttatatatagaattataaaagggtttgtaaataattacaacagatggcctactttaagaaatgctattgttttacccttaagatggttaacttactataaactaaacacttatccttctttgttggaacttacagaaagagatttgattgtgttatcaggactacgtttctatcgtgagtttcggttgcctaaaaaagtggatcttgaaatgattataaatgataaagctatatcacctcctaaaaatttgatatggactagtttccctagaaattacatgccatcacacatacaaaactatatagaacatgaaaaattaaaattttccgagagtgataaatcaagaagagtattagagtattatttaagagataacaaattcaatgaatgtgatttatacaactgtgtagttaatcaaagttatctcaacaaccctaatcatgtggtatcattgacaggcaaagaaagagaactcagtgtaggtagaatgtttgcaatgcaaccgggaatgttcagacaggttcaaatattggcagagaaaatgatagctgaaaacattttacaattctttcctgaaagtcttacaagatatggtgatctagaactacaaaaaatattagaattgaaagcaggaataagtaacaaatcaaatcgctacaatgataattacaacaattacattagtaagtgctctatcatcacagatctcagcaaattcaatcaagcatttcgatatgaaacgtcatgtatttgtagtgatgtgctggatgaactgcatggtgtacaatctctattttcctggttacatttaactattcctcatgtcacaataatatgcacatataggcatgcacccccctatataggagatcatattgtagatcttaacaatgtagatgaacaaagtggattatatagatatcacatgggtggcatcgaagggtggtgtcaaaaactgtggaccatagaagctatatcactattggatctaatatctctcaaagggaaattctcaattactgctttaattaatggtgacaatcaatcaatagatataagcaaaccaatcagactcatggaaggtcaaactcatgctcaagcagattatttgctagcattaaatagccttaaattactgtataaagagtatgcaggcataggccacaaattaaaaggaactgagacttatatatcacgagatatgcaatttatgagtaaaacaattcaacataacggtgtatattacccagctagtataaagaaagtcctaagagtgggaccgtggataaacactatacttgatgatttcaaagtgagtctagaatctataggtagtttgacacaagaattagaatatagaggtgaaagtctattatgcagtttaatatttagaaatgtatggttatataatcagattgctctacaattaaaaaatcatgcattatgtaacaataaactatatttggacatattaaaggttctgaaacacttaaaaaccttttttaatcttgataatattgatacagcattaacattgtatatgaatttacccatgttatttggtggtggtgatcccaacttgttatatcgaagtttctatagaagaactcctgacttcctcacagaggctatagttcactctgtgttcatacttagttattatacaaaccatgacttaaaagataaacttcaagatctgtcagatgatagattgaataagttcttaacatgcataatcacgtttgacaaaaaccctaatgctgaattcgtaacattgatgagagatcctcaagctttagggtctgagagacaagctaaaattactagcgaaatcaatagactggcagttacagaggttttgagtacagctccaaacaaaatattctccaaaagtgcacaacattatactactacagagatagatctaaatgatattatgcaaaatatagaacctacatatcctcatgggctaagagttgtttatgaaagtttacccttttataaagcagagaaaatagtaaatcttatatcaggtacaaaatctataactaacatactggaaaaaacttctgccatagacttaacagatattgatagagccactgagatgatgaggaaaaacataactttgcttataaggatacttccattggattgtaacagagataaaagagagatattgagtatggaaaacctaagtattactgaattaagcaaatatgttagggaaagatcttggtctttatccaatatagttggtgttacatcacccagtatcatgtatacaatggacatcaaatatactacaagcactatatctagtggcataattatagagaaatataatgttaacagtttaacacgtggtgagagaggacccactaaaccatgggttggttcatctacacaagagaaaaaaacaatgccagtttataatagacaagtcttaaccaaaaaacagagagatcaaatagatctattagcaaaattggattgggtgtatgcatctatagataacaaggatgaattcatggaagaactcagcataggaacccttgggttaacatatgaaaaggccaagaaattatttccacaatatttaagtgtcaattatttgcatcgccttacagtcagtagtagaccatgtgaattccctgcatcaataccagcttatagaacaacaaattatcactttgacactagccctattaatcgcatattaacagaaaagtatggtgatgaagatattgacatagtattccaaaactgtataagctttggccttagtttaatgtcagtagtagaacaatttactaatgtatgtcctaacagaattattctcatacctaagcttaatgagatacatttgatgaaacctcccatattcacaggtgatgttgatattcacaagttaaaacaagtgatacaaaaacagcatatgtttttaccagacaaaataagtttgactcaatatgtggaattattcttaagtaataaaacactcaaatctggatctcatgttaattctaatttaatattggcacataaaatatctgactattttcataatacttacattttaagtactaatttagctggacattggattctgattatacaacttatgaaagattctaaaggtatttttgaaaaagattggggagagggatatataactgatcatatgtttattaatttgaaagttttcttcaatgcttataagacctatctcttgtgttttcataaaggttatggcaaagcaaagctggagtgtgatatgaacacttcagatcttctatgtgtattggaattaatagacagtagttattggaagtctatgtctaaggtatttttagaacaaaaagttatcaaatacattcttagccaagatgcaagtttacatagagtaaaaggatgtcatagcttcaaattatggtttcttaaacgtcttaatgtagcagaattcacagtttgcccttgggttgttaacatagattatcatccaacacatatgaaagcaatattaacttatatagatcttgttagaatgggattgataaatatagatagaatacacattaaaaataaacacaaattcaatgatgaattttatacttctaatctcttctacattaattataacttctcagataatactcatctattaactaaacatataaggattgctaattctgaattagaaaataattacaacaaattatatcatcctacaccagaaaccctagagaatatactagccaatccgattaaaagtaatgacaaaaagacactgaatgactattgtataggtaaaaatgttgactcaataatgttaccattgttatctaataagaagcttattaaatcgtctgcaatgattagaaccaattacagcaaacaagatttgtataatttattccctatggttgtgattgatagaattatagatcattcaggcaatacagccaaatccaaccaactttacactactacttcccaccaaatatctttagtgcacaatagcacatcactttactgcatgcttccttggcatcatattaatagattcaattttgtatttagttctacaggttgtaaaattagtatagagtatattttaaaagatcttaaaattaaagatcccaattgtatagcattcataggtgaaggagcagggaatttattattgcgtacagtagtggaacttcatcctgacataagatatatttacagaagtctgaaagattgcaatgatcatagtttacctattgagtttttaaggctgtacaatggacatatcaacattgattatggtgaaaatttgaccattcctgctacagatgcaaccaacaacattcattggtcttatttacatataaagtttgctgaacctatcagtctttttgtctgtgatgccgaattgtctgtaacagtcaactggagtaaaattataatagaatggagcaagcatgtaagaaagtgcaagtactgttcctcagttaataaatgtatgttaatagtaaaatatcatgctcaagatgatattgatttcaaattagacaatataactatattaaaaacttatgtatgcttaggcagtaagttaaagggatcggaggtttacttagtccttacaataggtcctgcgaatatattcccagtatttaatgtagtacaaaatgctaaattgatactatcaagaaccaaaaatttcatcatgcctaagaaagctgataaagagtctattgatgcaaatattaaaagtttgataccctttctttgttaccctataacaaaaaaaggaattaatactgcattgtcaaaactaaagagtgttgttagtggagatatactatcatattctatagctggacgtaatgaagttttcagcaataaacttataaatcataagcatatgaacatcttaaaatggttcaatcatgttttaaatttcagatcaacagaactaaactataaccatttatatatggtagaatctacatatccttacctaagtgaattgttaaacagcttgacaaccaatgaacttaaaaaactgattaaaatcacaggtagtctgttatacaactttcataatgaataatgaataaagatcttataataaaaattcccatagctatacactaacactgtattcaattatagttattaaaaattaaaaatcgtacgattttttaaataacttttagtgaactaatcctaaagttatcattttaatcttggaggaataaatttaaaccctaatctaattggtttatatgtgtattaactaaattacgagatattagtttttgacactttttttctcgt

SEQ ID NO: 19 - protein, 6 aa, Artificial Sequence
  Description of Artificial Sequence: Synthetic peptide
GGGGGG

SEQ ID NO: 20 - protein, 5 aa, Artificial Sequence
  Description of Artificial Sequence: Synthetic peptide
GGGGT

SEQ ID NO: 21 - protein, 6 aa, Artificial Sequence
  Description of Artificial Sequence: Synthetic peptide
GGGPPP

SEQ ID NO: 22 - protein, 7 aa, Artificial Sequence
  Description of Artificial Sequence: Synthetic peptide
GGGAPPP

SEQ ID NO: 23 - protein, 1273 aa, Severe acute respiratory syndrome coronavirus 2
MFVFLVLLPLVSSQCVNLTTRTQLPPAYTNSFTRGVYYPDKVFRSSVLHSTQDLFLPFFSNVTWFHAIHVSGTNGTKRFDNPVLPFNDGVYFASTEKSNIIRGWIFGTTLDSKTQSLLIVNNATNVVIKVCEFQFCNDPFLGVYYHKNNKSWMESEFRVYSSANNCTFEYVSQPFLMDLEGKQGNFKNLREFVFKNIDGYFKIYSKHTPINLVRDLPQGFSALEPLVDLPIGINITRFQTLLALHRSYLTPGDSSSGWTAGAAAYYVGYLQPRTFLLKYNENGTITDAVDCALDPLSETKCTLKSFTVEKGIYQTSNFRVQPTESIVRFPNITNLCPFGEVFNATRFASVYAWNRKRISNCVADYSVLYNSASFSTFKCYGVSPTKLNDLCFTNVYADSFVIRGDEVRQIAPGQTGKIADYNYKLPDDFTGCVIAWNSNNLDSKVGGNYNYLYRLFRKSNLKPFERDISTEIYQAGSTPCNGVEGFNCYFPLQSYGFQPTNGVGYQPYRVVVLSFELLHAPATVCGPKKSTNLVKNKCVNFNFNGLTGTGVLTESNKKFLPFQQFGRDIADTTDAVRDPQTLEILDITPCSFGGVSVITPGTNTSNQVAVLYQDVNCTEVPVAIHADQLTPTWRVYSTGSNVFQTRAGCLIGAEHVNNSYECDIPIGAGICASYQTQTNSPRRARSVASQSIIAYTMSLGAENSVAYSNNSIAIPTNFTISVTTEILPVSMTKTSVDCTMYICGDSTECSNLLLQYGSFCTQLNRALTGIAVEQDKNTQEVFAQVKQIYKTPPIKDFGGFNFSQILPDPSKPSKRSFIEDLLFNKVTLADAGFIKQYGDCLGDIAARDLICAQKFNGLTVLPPLLTDEMIAQYTSALLAGTITSGWTFGAGAALQIPFAMQMAYRFNGIGVTQNVLYENQKLIANQFNSAIGKIQDSLSSTASALGKLQDVVNQNAQALNTLVKQLSSNFGAISSVLNDILSRLDKVEAEVQIDRLITGRLQSLQTYVTQQLIRAAEIRASANLAATKMSECVLGQSKRVDFCGKGYHLMSFPQSAPHGVVFLHVTYVPAQEKNFTTAPAICHDGKAHFPREGVFVSNGTHWFVTQRNFYEPQIITTDNTFVSGNCDVVIGIVNNTVYDPLQPELDSFKEELDKYFKNHTSPDVDLGDISGINASVVNIQKEIDRLNEVAKNLNESLIDLQELGKYEQYIKWPWYIWLGFIAGLIAIVMVTIMLCCMTSCCSCLKGCCSCGSCCKFDEDDSEPVLKGVKLHYT

SEQ ID NO: 24 - DNA, 3822 bp, Severe acute respiratory syndrome coronavirus 2
atgtttgtttttcttgttttattgccactagtctctagtcagtgtgttaatcttacaaccagaactcaattaccccctgcatacactaattctttcacacgtggtgtttattaccctgacaaagttttcagatcctcagttttacattcaactcaggacttgttcttacctttcttttccaatgttacttggttccatgctatacatgtctctgggaccaatggtactaagaggtttgataaccctgtcctaccatttaatgatggtgtttattttgcttccactgagaagtctaacataataagaggctggatttttggtactactttagattcgaagacccagtccctacttattgttaataacgctactaatgttgttattaaagtctgtgaatttcaattttgtaatgatccatttttgggtgtttattaccacaaaaacaacaaaagttggatggaaagtgagttcagagtttattctagtgcgaataattgcacttttgaatatgtctctcagccttttcttatggaccttgaaggaaaacagggtaatttcaaaaatcttagggaatttgtgtttaagaatattgatggttattttaaaatatattctaagcacacgcctattaatttagtgcgtgatctccctcagggtttttcggctttagaaccattggtagatttgccaataggtattaacatcactaggtttcaaactttacttgctttacatagaagttatttgactcctggtgattcttcttcaggttggacagctggtgctgcagcttattatgtgggttatcttcaacctaggacttttctattaaaatataatgaaaatggaaccattacagatgctgtagactgtgcacttgaccctctctcagaaacaaagtgtacgttgaaatccttcactgtagaaaaaggaatctatcaaacttctaactttagagtccaaccaacagaatctattgttagatttcctaatattacaaacttgtgcccttttggtgaagtttttaacgccaccagatttgcatctgtttatgcttggaacaggaagagaatcagcaactgtgttgctgattattctgtcctatataattccgcatcattttccacttttaagtgttatggagtgtctcctactaaattaaatgatctctgctttactaatgtctatgcagattcatttgtaattagaggtgatgaagtcagacaaatcgctccagggcaaactggaaagattgctgattataattataaattaccagatgattttacaggctgcgttatagcttggaattctaacaatcttgattctaaggttggtggtaattataattacctgtatagattgtttaggaagtctaatctcaaaccttttgagagagatatttcaactgaaatctatcaggccggtagcacaccttgtaatggtgttgaaggttttaattgttactttcctttacaatcatatggtttccaacccactaatggtgttggttaccaaccatacagagtagtagtactttcttttgaacttctacatgcaccagcaactgtttgtggacctaaaaagtctactaatttggttaaaaacaaatgtgtcaatttcaacttcaatggtttaacaggcacaggtgttcttactgagtctaacaaaaagtttctgcctttccaacaatttggcagagacattgctgacactactgatgctgtccgtgatccacagacacttgagattcttgacattacaccatgttcttttggtggtgtcagtgttataacaccaggaacaaatacttctaaccaggttgctgttctttatcaggatgttaactgcacagaagtccctgttgctattcatgcagatcaacttactcctacttggcgtgtttattctacaggttctaatgtttttcaaacacgtgcaggctgtttaataggggctgaacatgtcaacaactcatatgagtgtgacatacccattggtgcaggtatatgcgctagttatcagactcagactaattctcctcggcgggcacgtagtgtagctagtcaatccatcattgcctacactatgtcacttggtgcagaaaattcagttgcttactctaataactctattgccatacccacaaattttactattagtgttaccacagaaattctaccagtgtctatgaccaagacatcagtagattgtacaatgtacatttgtggtgattcaactgaatgcagcaatcttttgttgcaatatggcagtttttgtacacaattaaaccgtgctttaactggaatagctgttgaacaagacaaaaacacccaagaagtttttgcacaagtcaaacaaatttacaaaacaccaccaattaaagattttggtggttttaatttttcacaaatattaccagatccatcaaaaccaagcaagaggtcatttattgaagatctacttttcaacaaagtgacacttgcagatgctggcttcatcaaacaatatggtgattgccttggtgatattgctgctagagacctcatttgtgcacaaaagtttaacggccttactgttttgccacctttgctcacagatgaaatgattgctcaatacacttctgcactgttagcgggtacaatcacttctggttggacctttggtgcaggtgctgcattacaaataccatttgctatgcaaatggcttataggtttaatggtattggagttacacagaatgttctctatgagaaccaaaaattgattgccaaccaatttaatagtgctattggcaaaattcaagactcactttcttccacagcaagtgcacttggaaaacttcaagatgtggtcaaccaaaatgcacaagctttaaacacgcttgttaaacaacttagctccaattttggtgcaatttcaagtgttttaaatgatatcctttcacgtcttgacaaagttgaggctgaagtgcaaattgataggttgatcacaggcagacttcaaagtttgcagacatatgtgactcaacaattaattagagctgcagaaatcagagcttctgctaatcttgctgctactaaaatgtcagagtgtgtacttggacaatcaaaaagagttgatttttgtggaaagggctatcatcttatgtccttccctcagtcagcacctcatggtgtagtcttcttgcatgtgacttatgtccctgcacaagaaaagaacttcacaactgctcctgccatttgtcatgatggaaaagcacactttcctcgtgaaggtgtctttgtttcaaatggcacacactggtttgtaacacaaaggaatttttatgaaccacaaatcattactacagacaacacatttgtgtctggtaactgtgatgttgtaataggaattgtcaacaacacagtttatgatcctttgcaacctgaattagactcattcaaggaggagttagataaatattttaagaatcatacatcaccagatgttgatttaggtgacatctctggcattaatgcttcagttgtaaacattcaaaaagaaattgaccgcctcaatgaggttgccaagaatttaaatgaatctctcatcgatctccaagaacttggaaagtatgagcagtatataaaatggccatggtacatttggctaggttttatagctggcttgattgccatagtaatggtgacaattatgctttgctgtatgaccagttgctgtagttgtctcaagggctgttgttcttgtggatcctgctgcaaatttgatgaagacgactctgagccagtgctcaaaggagtcaaattacattacacataa

SEQ ID NO: 25 - protein, 24 aa, Human orthopneumovirus
KARSTPVTLSKDQLSGINNIAFSN

SEQ ID NO: 26 - protein, 24 aa, Human orthopneumovirus
KARSTPITLSKDQLSGINNIAFSN

SEQ ID NO: 27 - protein, 26 aa, Human orthopneumovirus
IMITTIIIVIIVILLSLIAVGLLLYC

SEQ ID NO: 28 - protein, 26 aa, Human orthopneumovirus
IMITAIIIVIIVVLLSLIAIGLLLYC

SEQ ID NO: 29 - protein, 6 aa, Human orthopneumovirus
GKSTTN

SEQ ID NO: 30 - protein, 56 aa, Human orthopneumovirus
GKSTTNIMITTIIIVIIVILLSLIAVGLLLYCKARSTPVTLSKDQLSGINNIAFSN

SEQ ID NO: 31 - protein, 56 aa, Human orthopneumovirus
GKSTTNIMITAIIIVIIVVLLSLIAIGLLLYCKARSTPITLSKDQLSGINNIAFSN

SEQ ID NO: 32 - protein, 30 aa, Human orthopneumovirus
GLLLYCKARSTPVTLSKDQLSGINNIAFSN

SEQ ID NO: 33 - protein, 26 aa, Human orthopneumovirus
YCKARSTPVTLSKDQLSGINNIAFSN

SEQ ID NO: 34 - protein, 25 aa, Human orthopneumovirus
CKARSTPVTLSKDQLSGINNIAFSN

SEQ ID NO: 35 - protein, 24 aa, Human orthopneumovirus
KARSTPVTLSKDQLSGINNIAFSN

SEQ ID NO: 36 - protein, 23 aa, Human orthopneumovirus
ARSTPVTLSKDQLSGINNIAFSN

SEQ ID NO: 37 - protein, 30 aa, Human orthopneumovirus
GLLLYCKARSTPITLSKDQLSGINNIAFSN

SEQ ID NO: 38 - protein, 26 aa, Human orthopneumovirus
YCKARSTPITLSKDQLSGINNIAFSN

SEQ ID NO: 39 - protein, 25 aa, Human orthopneumovirus
CKARSTPITLSKDQLSGINNIAFSN

SEQ ID NO: 40 - protein, 24 aa, Human orthopneumovirus
KARSTPITLSKDQLSGINNIAFSN

SEQ ID NO: 41 - protein, 23 aa, Human orthopneumovirus
ARSTPITLSKDQLSGINNIAFSN

SEQ ID NO: 42 - protein, 4 aa, Artificial Sequence
  Description of Artificial Sequence: Synthetic peptide
RQSR

SEQ ID NO: 43 - protein, 4 aa, Artificial Sequence
  Description of Artificial Sequence: Synthetic peptide
RRRR

SEQ ID NO: 44 - DNA, 420 bp, Artificial Sequence
  Description of Artificial Sequence: Synthetic polynucleotide
atgggttcgaattcgctatcgatgataaaagtacgtctacaaaatctatttgataatgatgaagtagcgctactaaaaataacgtgttatacggataaactaatacatctaacgaatgcgctagcgaaagcggtaatacatacgataaaactaaatggtatagtatttgtacatgtaataacgtcgtcggatatatgtccgaataataatatagtagtaaaatcgaattttacgacgatgccggtactacaaaatggtggttatatatgggaaatgatggaactaacgcattgttcgcaaccgaatggtctactagatgataattgtgaaataaaattttcgaaaaaactatcggattcgacgatgacgaattatatgaatcaactatcggaactactaggttttgatctaaatccgtaa

SEQ ID NO: 45 - DNA, 375 bp, Artificial Sequence
  Description of Artificial Sequence: Synthetic polynucleotide
atggatacgacgcataatgataatacgccgcaacgtctaatgataacggatatgcgtccgctatcgctagaaacgataataacgtcgctaacgcgtgatataataacgcataaatttatatatctaataaatcatgaatgtatagtacgtaaactagatgaacgtcaagcgacgtttacgtttctagtaaattatgaaatgaaactactacataaagtaggttcgacgaaatataaaaaatatacggaatataatacgaaatatggtacgtttccgatgccgatatttataaatcatgatggttttctagaatgtataggtataaaaccgacgaaacatacgccgataatatataaatatgatctaaatccgtaa

SEQ ID NO: 46 - DNA, 22276 bp, Artificial Sequence
  Description of Artificial Sequence: Synthetic polynucleotide
aaacggatccttcgaaacgaaattaatacgactcactatagggaagtttttcgcgtctgatgaggccgttaggccgaaactcctctccggagtcacgcgaaaaaatgcgtacaacaaacttgcataaaccaaaaaaatggggcaaataagaatttgataagtaccacttaaatttaactcccttgcttagcgatggtgagcgagctgattaaggagaacatgcacatgaagctgtacatggagggcaccgtgaacaaccaccacttcaagtgcacatccgagggcgaaggcaagccctacgagggcacccagaccatgagaatcaaggcggtcgagggcggccctctccccttcgccttcgacatcctggctaccagcttcatgtacggcagcaaaaccttcatcaaccacacccagggcatccccgacttctttaagcagtccttccccgagggcttcacatgggagagagtcaccacatacgaagacgggggcgtgctgaccgctacccaggacaccagcctccaggacggctgcctcatctacaacgtcaagatcagaggggtgaacttcccatccaacggccctgtgatgcagaagaaaacactcggctgggaggcctccaccgagaccctgtaccccgctgacggcggcctggaaggcagagccgacatggccctgaagctcgtgggcgggggccacctgatctgcaacttgaagaccacatacagatccaagaaacccgctaagaacctcaagatgcccggcgtctactatgtggacagaagactggaaagaatcaaggaggccgacaaagagacctacgtcgagcagcacgaggtggctgtggccagatactgcgacctccctagcaaactggggcacagatgagtattcaattatagttattaaaaacttaacagaagacaaaaatggggcaaataagaatttgataagtaccacttaaatttaactcccttgcttagcgatgggttcgaattcgctatcgatgataaaagtacgtctacaaaatctatttgataatgatgaagtagcgctactaaaaataacgtgttatacggataaactaatacatctaacgaatgcgctagcgaaagcggtaatacatacgataaaactaaatggtatagtatttgtacatgtaataacgtcgtcggatatatgtccgaataataatatagtagtaaaatcgaattttacgacgatgccggtactacaaaatggtggttatatatgggaaatgatggaactaacgcattgttcgcaaccgaatggtctactagatgataattgtgaaataaaattttcgaaaaaactatcggattcgacgatgacgaattatatgaatcaactatcggaactactaggttttgatctaaatccgtaaattataattaatatcaactagcaaatcaatgtcactaacaccattagttaatataaaacttaacagaagacaaaaatggggcaaataaatcaattcagccaacccaaccatggatacgacgcataatgataatacgccgcaacgtctaatgataacggatatgcgtccgctatcgctagaaacgataataacgtcgctaacgcgtgatataataacgcataaatttatatatctaataaatcatgaatgtatagtacgtaaactagatgaacgtcaagcgacgtttacgtttctagtaaattatgaaatgaaactactacataaagtaggttcgacgaaatataaaaaatatacggaatataatacgaaatatggtacgtttccgatgccgatatttataaatcatgatggttttctagaatgtataggtataaaaccgacgaaacatacgccgataatatataaatatgatctaaatccgtaaatttcaacacaatattcacacaatctaaaacaacaactctatgcataactatactccatagtccagatggagcctgaaaattatagtaatttaaaattaaggagagatataagatagaagatggggcaaatacaaagatggctcttagcaaagtcaagttgaatgatacactcaacaaagatcaacttctgtcatccagcaaatacaccatccaacggagcacaggagatagtattgatactcctaattatgatgtgcagaaacacatcaataagttatgtggcatgttattaatcacagaagatgctaatcataaattcactgggttaataggtatgttatatgcgatgtctaggttaggaagagaagacaccataaaaatactcagagatgcgggatatcatgtaaaagcaaatggagtagatgtaacaacacatcgtcaagacattaatggaaaagaaatgaaatttgaagtgttaacattggcaagcttaacaactgaaattcaaatcaacattgagatagaatctagaaaatcctacaaaaaaatgctaaaagaaatgggagaggtagctccagaatacaggcatgactctcctgattgtgggatgataatattatgtatagcagcattagtaataactaaattagcagcaggggacagatctggtcttacagccgtgattaggagagctaataatgtcctaaaaaatgaaatgaaacgttacaaaggcttactacccaaggacatagccaacagcttctatgaagtgtttgaaaaacatccccactttatagatgtttttgttcattttggtatagcacaatcttctaccagaggtggcagtagagttgaagggatttttgcaggattgtttatgaatgcctatggtgcagggcaagtgatgttacggtggggagtcttagcaaaatcagttaaaaatattatgttaggacatgctagtgtgcaagcagaaatggaacaagttgttgaggtttatgaatatgcccaaaaattgggtggtgaagcaggattctaccatatattgaacaacccaaaagcatcattattatctttgactcaatttcctcacttctccagtgtagtattaggcaatgctgctggcctaggcataatgggagagtacagaggtacaccgaggaatcaagatctatatgatgcagcaaaggcatatgctgaacaactcaaagaaaatggtgtgattaactacagtgtactagacttgacagcagaagaactagaggctatcaaacatcagcttaatccaaaagataatgatgtagagctttgagttaataaaaaatggggcaaataaatcatcatggaaaagtttgctcctgaattccatggagaagatgcaaacaacagggctactaaattcctagaatcaataaagggcaaattcacatcacccaaagatcccaagaaaaaagatagtatcatatctgtcaactcaatagatatagaagtaaccaaagaaagccctataacatcaaattcaactattatcaacccaacaaatgagacagatgatactgcagggaacaagcccaattatcaaagaaaacctctagtaagtttcaaagaagaccctacaccaagtgataatcccttttctaaactatacaaagaaaccatagaaacatttgataacaatgaagaagaatccagctattcatacgaagaaataaatgatcagacaaacgataatataacagcaagattagataggattgatgaaaaattaagtgaaatactaggaatgcttcacacattagtagtggcaagtgcaggacctacatctgctcgggatggtataagagatgccatgattggtttaagagaagaaatgatagaaaaaatcagaactgaagcattaatgaccaatgacagattagaagctatggcaagactcaggaatgaggaaagtgaaaagatggcaaaagacacatcagatgaagtgtctctcaatccaacatcagagaaattgaacaacctattggaagggaatgatagtgacaatgatctatcacttgaagatttctgattagttaccactcttcacatcaacacacaataccaacagaagaccaacaaactaaccaacccaatcatccaaccaaacatccatccgccaatcagccaaacagccaacaaaacaaccagccaatccaaaactaaccacccggaaaaaatctataatatagttacaaaaaaaggaaagggtggggcaaatatggaaacatacgtgaacaagcttcacgaaggctccacatacacagctgctgttcaatacaatgtcttagaaaaagacgatgaccctgcatcacttacaatatgggtgcccatgttccaatcatctatgccagcagatttacttataaaagaactagctaatgtcaacatactagtgaaacaaatatccacacccaagggaccttcactaagagtcatgataaactcaagaagtgcagtgctagcacaaatgcccagcaaatttaccatatgcgctaatgtgtccttggatgaaagaagcaaactagcatatgatgtaaccacaccctgtgaaatcaaggcatgtagtctaacatgcctaaaatcaaaaaatatgttgactacagttaaagatctcactatgaagacactcaaccctacacatgatattattgctttatgtgaatttgaaaacatagtaacatcaaaaaaagtcataataccaacatacctaagatccatcagtgtcagaaataaagatctgaacacacttgaaaatataacaaccactgaattcaaaaatgctatcacaaatgcaaaaatcatcccttactcaggattactattagtcatcacagtgactgacaacaaaggagcattcaaatacataaagccacaaagtcaattcatagtagatcttggagcttacctagaaaaagaaagtatatattatgttaccacaaattggaagcacacagctacacgatttgcaatcaaacccatggaagattaacctttttcctctacatcagtgtgttaattcatacaaactttctacctacattcttcacttcaccatcacaatcacaaacactctgtggttcaaccaatcaaacaaaacttatctgaagtcccagatcatcccaagtcattgtttatcagatctagtactcaaataagttaataaaaaatatacacatggacgtccatggggcaaatgcaaacatgtccaaaaacaaggaccaacgcaccgctaagacattagaaaggacctgggacactctcaatcatttattattcatatcatcgtgcttatataagttaaatcttaaatctgtagcacaaatcacattatccattctggcaatgataatctcaacttcacttataattgcagccatcatattcatagcctcggcaaaccacaaagtcacaccaacaactgcaatcatacaagatgcaacaagccagatcaagaacacaaccccaacatacctcacccagaatcctcagcttggaatcagtccctctaatccgtctgaaattacatcacaaatcaccaccatactagcttcaacaacaccaggagtcaagtcaaccctgcaatccacaacagtcaagaccaaaaacacaacaacaactcaaacacaacccagcaagcccaccacaaaacaacgccaaaacaaaccaccaagcaaacccaataatgattttcactttgaagtgttcaactttgtaccctgcagcatatgcagcaacaatccaacctgctgggctatctgcaaaagaataccaaacaaaaaaccaggaaagaaaaccactaccaagcccacaaaaaaaccaaccctcaagacaaccaaaaaagatcccaaacctcaaaccactaaatcaaaggaagtacccaccaccaagcccacagaagagccaaccatcaacaccaccaaaacaaacatcataactacactactcacctccaacaccacaggaaatccagaactcacaagtcaaatggaaaccttccactcaacttcctccgaaggcaatccaagcccttctcaagtctctacaacatccgagtacccatcacaaccttcatctccacccaacacaccacgccagtagttacttaaaaacatattatcacaaaaggccttgaccaaccgcggagaatcaaaataaactctggggcaaataacaatggagttgctgatccatagatcaagtgcaatcttcctaactcttgctattaatgcattgtacctcacctcaagtcagaacataactgaggagttttaccaatcgacatgtagtgcagttagcagaggttacttgagtgctttaagaacaggttggtataccagtgtcataacaatagaattaagtaatataaaagaaaccaaatgcaatggaactgacactaaagtaaaacttataaaacaagaattagataagtataagaatgcagtaacagaattacagttacttatgcaaaacacaccagctgccaacaaccgggccagaagagaagcaccacagtatatgaactacacaatcaataccactaaaaacctaaatgtatcaataagcaagaagaggaaacgaagatttctgggcttcttgttaggtgtaggatctgcaatagcaagtggtatagctgtatccaaagttctacaccttgaaggagaagtgaacaagatcaaaaatgctttgctgtctacaaacaaagctgtagtcagtctatcaaatggggtcagtgttttaaccagcaaagtgttagatctcaagaattatataaacaaccaattattacctatagtaaatcaacagagttgtcgcatttccaacattgaaacagttatagaattccagcagaagaacagcagattgttggaaatcaccagagaatttagtgtcaatgcaggtgtaacgacacctttaagcacttacatgttaacaaacagtgagttactatcattaatcaatgatatgcctataacaaatgatcagaaaaaattaatgtcaagcaatgttcagatagtaaggcaacaaagttattctatcatgtctataataaaggaagaagtccttgcatatgttgtacagctacctatctatggtgtaattgatacaccttgctggaaattacacacatcacctctgtgcaccaccaacatcaaagaaggatcaaatatttgtttaacaaggactgatagaggatggtactgtgataatgcaggatcagtatccttctttccacaggctgacacttgtaaagtacagtccaatcgagtattttgtgacactatgaacagtttgacattaccaagtgaagtcagcctttgtaacactgacatattcaattccaagtatgactgcaaaattatgacatcaaaaacagacataagcagctcagtaattacttctctaggagctatagtgtcatgctatggtaaaactaaatgcactgcatccaacaaaaatcgtggaattataaagacattttctaatggttgtgattatgtgtcaaacaaaggagtagatactgtatcagtgggcaacactttatactatgtcaacaagctggaaggcaaaaacctttatgtaaaaggggaacctataataaattactatgaccctctagtgtttccttctgatgagtttgatgcatcaatatctcaagtcaatgaaaaaattaatcaaagtttagcttttattcgtagatccgatgaattattacataatgtaaatactggaaaatctactacaaatattatgataactgcaattattatagtaatcattgtagtattgttatcattaatagctattggtttactgttgtattgcaaagccaaaaacacaccagttacactaagcaaagaccaactaagtggaatcaataatattgcattcagcaaatagataaaaatagcacctaatcatgttcttacaatggtttactatctgctcatagacaacccatctatcattggattttcttaaaatctgaacttcatcgaaactcttatctataaaccatctcacttacactatttaagtagattcctagtttatagttatataaaacacaattgaatgccagtcgaccttaccatctgtaaaaatgaaaactggggcaaatatgtcacgaaggaatccttgcaaatttgaaattcgaggtcattgcttaaatggtaagaggtgtcattttagtcataattattttgaatggccaccccatgcactgcttgtaagacaaaactttatgttaaacagaatacttaagtctatggataaaagtatagataccttatcagaaataagtggagctgcagagttggacagaacagaagagtatgctcttggtgtagttggagtgctagagagttatataggatcaataaacaatataactaaacaatcagcatgtgttgccatgagcaaactcctcactgaactcaatagtgatgatatcaaaaagctgagggacaatgaagagctaaattcacccaagataagagtgtacaatactgtcatatcatatattgaaagcaacaggaaaaacaataaacaaactatccatctgttaaaaagattgccagcagacgtattgaagaaaaccatcaaaaacacattggatatccataagagcataaccatcaacaacccaaaagaatcaactgttagtgatacaaatgaccatgccaaaaataatgatactacctgacaaatatccttgtagtataacttccatactaataacaagtagatgtagagttactatgtataatcaaaagaacacactatatttcaatcaaaacaacccaaataaccatatgtactcaccgaatcaaacattcaatgaaatccattggacctctcaagaattgattgacacaattcaaaattttctacaacatctaggtattattgaggatatatatacaatatatatattagtgtcataacactcaattctaacactcaccacatcgttacattattaattcaaacaattcaagttgtgggacaaaatggatcccattattaatggaaattctgctaatgtttatctaaccgatagttatttaaaaggtgttatctctttctcagagtgtaatgctttaggaagttacatattcaatggtccttatctcaaaaatgattataccaacttaattagtagacaaaatccattaatagaacacatgaatctaaagaaactaaatataacacagtccttaatatctaagtatcataaaggtgaaataaaattagaagaacctacttattttcagtcattacttatgacatacaagagtatgacctcgtcagaacagattgctaccactaatttacttaaaaagataataagaagagctatagaaataagtgatgtcaaagtctatgctatattgaataaactagggcttaaagaaaaggacaagattaaatccaacaatggacaagatgaagacaactcagttattacgaccataatcaaagatgatatactttcagctgttaaagataatcaatctcatcttaaagcagacaaaaatcactctacaaaacaaaaagacacaatcaaaacaacactcttgaagaaattgatgtgttcaatgcaacatcctccatcatggttaatacattggtttaacttatacacaaaattaaacaacatattaacacagtatcgatcaaatgaggtaaaaaaccatgggtttacattgatagataatcaaactcttagtggatttcaatttattttgaaccaatatggttgtatagtttatcataaggaactcaaaagaattactgtgacaacctataatcaattcttgacatggaaagatattagccttagtagattaaatgtttgtttaattacatggattagtaactgcttgaacacattaaataaaagcttaggcttaagatgcggattcaataatgttatcttgacacaactattcctttatggagattgtatactaaagctatttcacaatgaggggttctacataataaaagaggtagagggatttattatgtctctaattttaaatataacagaagaagatcaattcagaaaacgattttataatagtatgctcaacaacatcacagatgctgctaataaagctcagaaaaatctgctatcaagagtatgtcatacattattagataagacagtgtccgataatataataaatggcagatggataattctattaagtaagttccttaaattaattaagcttgcaggtgacaataaccttaacaatctgagtgaactatattttttgttcagaatatttggacacccaatggtagatgaaagacaagccatggatgctgttaaaattaattgcaatgagaccaaattttacttgttaagcagtctgagtatgttaagaggtgcctttatatatagaattataaaagggtttgtaaataattacaacagatggcctactttaagaaatgctattgttttacccttaagatggttaacttactataaactaaacacttatccttctttgttggaacttacagaaagagatttgattgtgttatcaggactacgtttctatcgtgagtttcggttgcctaaaaaagtggatcttgaaatgattataaatgataaagctatatcacctcctaaaaatttgatatggactagtttccctagaaattacatgccatcacacatacaaaactatatagaacatgaaaaattaaaattttccgagagtgataaatcaagaagagtattagagtattatttaagagataacaaattcaatgaatgtgatttatacaactgtgtagttaatcaaagttatctcaacaaccctaatcatgtggtatcattgacaggcaaagaaagagaactcagtgtaggtagaatgtttgcaatgcaaccgggaatgttcagacaggttcaaatattggcagagaaaatgatagctgaaaacattttacaattctttcctgaaagtcttacaagatatggtgatctagaactacaaaaaatattagaattgaaagcaggaataagtaacaaatcaaatcgctacaatgataattacaacaattacattagtaagtgctctatcatcacagatctcagcaaattcaatcaagcatttcgatatgaaacgtcatgtatttgtagtgatgtgctggatgaactgcatggtgtacaatctctattttcctggttacatttaactattcctcatgtcacaataatatgcacatataggcatgcacccccctatataggagatcatattgtagatcttaacaatgtagatgaacaaagtggattatatagatatcacatgggtggcatcgaagggtggtgtcaaaaactgtggaccatagaagctatatcactattggatctaatatctctcaaagggaaattctcaattactgctttaattaatggtgacaatcaatcaatagatataagcaaaccaatcagactcatggaaggtcaaactcatgctcaagcagattatttgctagcattaaatagccttaaattactgtataaagagtatgcaggcataggccacaaattaaaaggaactgagacttatatatcacgagatatgcaatttatgagtaaaacaattcaacataacggtgtatattacccagctagtataaagaaagtcctaagagtgggaccgtggataaacactatacttgatgatttcaaagtgagtctagaatctataggtagtttgacacaagaattagaatatagaggtgaaagtctattatgcagtttaatatttagaaatgtatggttatataatcagattgctctacaattaaaaaatcatgcattatgtaacaataaactatatttggacatattaaaggttctgaaacacttaaaaaccttttttaatcttgataatattgatacagcattaacattgtatatgaatttacccatgttatttggtggtggtgatcccaacttgttatatcgaagtttctatagaagaactcctgacttcctcacagaggctatagttcactctgtgttcatacttagttattatacaaaccatgacttaaaagataaacttcaagatctgtcagatgatagattgaataagttcttaacatgcataatcacgtttgacaaaaaccctaatgctgaattcgtaacattgatgagagatcctcaagctttagggtctgagagacaagctaaaattactagcgaaatcaatagactggcagttacagaggttttgagtacagctccaaacaaaatattctccaaaagtgcacaacattatactactacagagatagatctaaatgatattatgcaaaatatagaacctacatatcctcatgggctaagagttgtttatgaaagtttacccttttataaagcagagaaaatagtaaatcttatatcaggtacaaaatctataactaacatactggaaaaaacttctgccatagacttaacagatattgatagagccactgagatgatgaggaaaaacataactttgcttataaggatacttccattggattgtaacagagataaaagagagatattgagtatggaaaacctaagtattactgaattaagcaaatatgttagggaaagatcttggtctttatccaatatagttggtgttacatcacccagtatcatgtatacaatggacatcaaatatactacaagcactatatctagtggcataattatagagaaatataatgttaacagtttaacacgtggtgagagaggacccactaaaccatgggttggttcatctacacaagagaaaaaaacaatgccagtttataatagacaagtcttaaccaaaaaacagagagatcaaatagatctattagcaaaattggattgggtgtatgcatctatagataacaaggatgaattcatggaagaactcagcataggaacccttgggttaacatatgaaaaggccaagaaattatttccacaatatttaagtgtcaattatttgcatcgccttacagtcagtagtagaccatgtgaattccctgcatcaataccagcttatagaacaacaaattatcactttgacactagccctattaatcgcatattaacagaaaagtatggtgatgaagatattgacatagtattccaaaactgtataagctttggccttagtttaatgtcagtagtagaacaatttactaatgtatgtcctaacagaattattctcatacctaagcttaatgagatacatttgatgaaacctcccatattcacaggtgatgttgatattcacaagttaaaacaagtgatacaaaaacagcatatgtttttaccagacaaaataagtttgactcaatatgtggaattattcttaagtaataaaacactcaaatctggatctcatgttaattctaatttaatattggcacataaaatatctgactattttcataatacttacattttaagtactaatttagctggacattggattctgattatacaacttatgaaagattctaaaggtatttttgaaaaagattggggagagggatatataactgatcatatgtttattaatttgaaagttttcttcaatgcttataagacctatctcttgtgttttcataaaggttatggcaaagcaaagctggagtgtgatatgaacacttcagatcttctatgtgtattggaattaatagacagtagttattggaagtctatgtctaaggtatttttagaacaaaaagttatcaaatacattcttagccaagatgcaagtttacatagagtaaaaggatgtcatagcttcaaattatggtttcttaaacgtcttaatgtagcagaattcacagtttgcccttgggttgttaacatagattatcatccaacacatatgaaagcaatattaacttatatagatcttgttagaatgggattgataaatatagatagaatacacattaaaaataaacacaaattcaatgatgaattttatacttctaatctcttctacattaattataacttctcagataatactcatctattaactaaacatataaggattgctaattctgaattagaaaataattacaacaaattatatcatcctacaccagaaaccctagagaatatactagccaatccgattaaaagtaatgacaaaaagacactgaatgactattgtataggtaaaaatgttgactcaataatgttaccattgttatctaataagaagcttattaaatcgtctgcaatgattagaaccaattacagcaaacaagatttgtataatttattccctatggttgtgattgatagaattatagatcattcaggcaatacagccaaatccaaccaactttacactactacttcccaccaaatatctttagtgcacaatagcacatcactttactgcatgcttccttggcatcatattaatagattcaattttgtatttagttctacaggttgtaaaattagtatagagtatattttaaaagatcttaaaattaaagatcccaattgtatagcattcataggtgaaggagcagggaatttattattgcgtacagtagtggaacttcatcctgacataagatatatttacagaagtctgaaagattgcaatgatcatagtttacctattgagtttttaaggctgtacaatggacatatcaacattgattatggtgaaaatttgaccattcctgctacagatgcaaccaacaacattcattggtcttatttacatataaagtttgctgaacctatcagtctttttgtctgtgatgccgaattgtctgtaacagtcaactggagtaaaattataatagaatggagcaagcatgtaagaaagtgcaagtactgttcctcagttaataaatgtatgttaatagtaaaatatcatgctcaagatgatattgatttcaaattagacaatataactatattaaaaacttatgtatgcttaggcagtaagttaaagggatcggaggtttacttagtccttacaataggtcctgcgaatatattcccagtatttaatgtagtacaaaatgctaaattgatactatcaagaaccaaaaatttcatcatgcctaagaaagctgataaagagtctattgatgcaaatattaaaagtttgataccctttctttgttaccctataacaaaaaaaggaattaatactgcattgtcaaaactaaagagtgttgttagtggagatatactatcatattctatagctggacgtaatgaagttttcagcaataaacttataaatcataagcatatgaacatcttaaaatggttcaatcatgttttaaatttcagatcaacagaactaaactataaccatttatatatggtagaatctacatatccttacctaagtgaattgttaaacagcttgacaaccaatgaacttaaaaaactgattaaaatcacaggtagtctgttatacaactttcataatgaataatgaataaagatcttataataaaaattcccatagctatacactaacactgtattcaattatagttattaaaaattaaaaatcgtacgattttttaaataacttttagtgaactaatcctaaagttatcattttaatcttggaggaataaatttaaaccctaatctaattggtttatatgtgtattaactaaattacgagatattagtttttgacactttttttctcgtgggtcggcatggcatctccacctcctcgcggtccgacctgggcatccgaaggaggacgcacgtccactcggatggctaagggagctgctaacaaagcccgaaaggaagctgagttggctgctgccaccgctgagcaataactagcataaccccttggggcctctaaacgggtcttgaggggttttttgctgaaaggaggaactatatacgcgtaagcttctcgacccattctcatgtttgacagcttatcatcgaatttctgccattcatccgcttattatcacttattcaggcgtagcaaccaggcgtttaagggcaccaataactgccttaaaaaaattacgccccgccctgccactcatcgcagtactgttgtaattcattaagcattctgccgacatggaagccatcacagacggcatgatgaacctgaatcgccagcggcatcagcaccttgtcgccttgcgtataatatttgcccatggtgaaaacgggggcgaagaagttgtccatattggccacgtttaaatcaaaactggtgaaactcacccagggattggctgagacgaaaaacatattctcaataaaccctttagggaaataggccaggttttcaccgtaacacgccacatcttgcgaatatatgtgtagaaactgccggaaatcgtcgtggtattcactccagagcgatgaaaacgtttcagtttgctcatggaaaacggtgtaacaagggtgaacactatcccatatcaccagctcaccgtctttcattgccatacggaattccggatgagcattcatcaggcgggcaagaatgtgaataaaggccggataaaacttgtgcttatttttctttacggtctttaaaaaggccgtaatatccagctgaacggtctggttataggtacattgagcaactgactgaaatgcctcaaaatgttctttacgatgccattgggatatatcaacggtggtatatccagtgatttttttctccattttagcttccttagctcctgaaaatctcgataactcaaaaaatacgcccggtagtgatcttatttcattatggtgaaagttggaacctcttacgtgccgatcaacgtctcattttcgccaaaagttggcccagggcttcccggtatcaacagggacaccaggatttatttattctgcgaagtgatcttccgtcacaggtatttattcgcgataagctcatggagcggcgtaaccgtcgcacaggaaggacagagaaagcgcggatctgggaagtgacggacagaacggtcaggacctggattggggaggcggttgccgccgctgctgctgacggtgtgacgttctctgttccggtcacaccacatacgttccgccattcctatgcgatgcacatgctgtatgccggtataccgctgaaagttctgcaaagcctgatgggacataagtccatcagttcaacggaagtctacacgaaggtttttgcgctggatgtggctgcccggcaccgggtgcagtttgcgatgccggagtctgatgcggttgcgatgctgaaacaattatcctgagaataaatgccttggcctttatatggaaatgtggaactgagtggatatgctgtttttgtctgttaaacagagaagctggctgttatccactgagaagcgaacgaaacagtcgggaaaatctcccattatcgtagagatccgcattattaatctcaggagcctgtgtagcgtttataggaagtagtgttctgtcatgatgcctgcaagcggtaacgaaaacgatttgaatatgccttcaggaacaatagaaatcttcgtgcggtgttacgttgaagtggagcggattatgtcagcaatggacagaacaacctaatgaacacagaaccatgatgtggtctgtccttttacagccagtaggctcgccgcagtcgagcgacggcgaagccctcgagtgagcgaggaagcaccagggaacagcacttatatattctgcttacacacgatgcctgaaaaaacttcccttggggttatccacttatccacggggatatttttataattattttttttatagtttttagatcttcttttttagagcgccttgtaggcctttatccatgctggttctagagaaggtgttgtgacaaattgccctttcagtgtgacaaatcaccctcaaatgacagtcctgtctgtgacaaattgcccttaaccctgtgacaaattgccctcagaagaagctgttttttcacaaagttatccctgcttattgactcttttttatttagtgtgacaatctaaaaacttgtcacacttcacatggatctgtcatggcggaaacagcggttatcaatcacaagaaacgtaaaaatagcccgcgaatcgtccagtcaaacgacctcactgaggcggcatatagtctctcccgggatcaaaaacgtatgctgtatctgttcgttgaccagatcagaaaatctgatggcaccctacaggaacatgacggtatctgcgagatccatgttgctaaatatgctgaaatattcggattgacctctgcggaagccagtaaggatatacggcaggcattgaagagtttcgcggggaaggaagtggttttttatcgccctgaagaggatgccggcgatgaaaaaggctatgaatcttttccttggtttatcaaacgtgcgcacagtccatccagagggctttacagtgtacatatcaacccatatctcattcccttctttatcgggttacagaaccggtttacgcagtttcggcttagtgaaacaaaagaaatcaccaatccgtatgccatgcgtttatacgaatccctgtgtcagtatcgtaagccggatggctcaggcatcgtctctctgaaaatcgactggatcatagagcgttaccagctgcctcaaagttaccagcgtatgcctgacttccgccgccgcttcctgcaggtctgtgttaatgagatcaacagcagaactccaatgcgcctctcatacattgagaaaaagaaaggccgccagacgactcatatcgtattttccttccgcgatatcacttccatgacgacaggatagtctgagggttatctgtcacagatttgagggtggttcgtcacatttgttctgacctactgagggtaatttgtcacagttttgctgtttccttcagcctgcatggattttctcatactttttgaactgtaatttttaaggaagccaaatttgagggcagtttgtcacagttgatttccttctctttcccttcgtcatgtgacctgatatcgggggttagttcgtcatcattgatgagggttgattatcacagtttattactctgaattggctatccgcgtgtgtacctctacctggagtttttcccacggtggatatttcttcttgcgctgagcgtaagagctatctgacagaacagttcttctttgcttcctcgccagttcgctcgctatgctcggttacacggctgcggcgagcgctagtgataataagtgactgaggtatgtgctcttcttatctccttttgtagtgttgctcttattttaaacaactttgcggttttttgatgactttgcgattttgttgttgctttgcagtaaattgcaagatttaataaaaaaacgcaaagcaatgattaaaggatgttcagaatgaaactcatggaaacacttaaccagtgcataaacgctggtcatgaaatgacgaaggctatcgccattgcacagtttaatgatgacagcccggaagcgaggaaaataacccggcgctggagaataggtgaagcagcggatttagttggggtttcttctcaggctatcagagatgccgagaaagcagggcgactaccgcacccggatatggaaattcgaggacgggttgagcaacgtgttggttatacaattgaacaaattaatcatatgcgtgatgtgtttggtacgcgattgcgacgtgctgaagacgtatttccaccggtgatcggggttgctgcccataaaggtggcgtttacaaaacctcagtttctgttcatcttgctcaggatctggctctgaaggggctacgtgttttgctcgtggaaggtaacgacccccagggaacagcctcaatgtatcacggatgggtaccagatcttcatattcatgcagaagacactctcctgcctttctatcttggggaaaaggacgatgtcacttatgcaataaagcccacttgctggccggggcttgacattattccttcctgtctggctctgcaccgtattgaaactgagttaatgggcaaatttgatgaaggtaaactgcccaccgatccacacctgatgctccgactggccattgaaactgttgctcatgactatgatgtcatagttattgacagcgcgcctaacctgggtatcggcacgattaatgtcgtatgtgctgctgatgtgctgattgttcccacgcctgctgagttgtttgactacacctccgcactgcagtttttcgatatgcttcgtgatctgctcaagaacgttgatcttaaagggttcgagcctgatgtacgtattttgcttaccaaatacagcaatagtaatggctctcagtccccgtggatggaggagcaaattcgggatgcctggggaagcatggttctaaaaaatgttgtacgtgaaacggatgaagttggtaaaggtcagatccggatgagaactgtttttgaacaggccattgatcaacgctcttcaactggtgcctggagaaatgctctttctatttgggaacctgtctgcaatgaaattttcgatcgtctgattaaaccacgctgggagattagataatgaagcgtgcgcctgttattccaaaacatacgctcaatactcaaccggttgaagatacttcgttatcgacaccagctgccccgatggtggattcgttaattgcgcgcgtaggagtaatggctcgcggtaatgccattactttgcctgtatgtggtcgggatgtgaagtttactcttgaagtgctccggggtgatagtgttgagaagacctctcgggtatggtcaggtaatgaacgtgaccaggagctgcttactgaggacgcactggatgatctcatcccttcttttctactgactggtcaacagacaccggcgttcggtcgaagagtatctggtgtcatagaaattgccgatgggagtcgccgtcgtaaagctgctgcacttaccgaaagtgattatcgtgttctggttggcgagctggatgatgagcagatggctgcattatccagattgggtaacgattatcgcccaacaagtgcttatgaacgtggtcagcgttatgcaagccgattgcagaatgaatttgctggaaatatttctgcgctggctgatgcggaaaatatttcacgtaagattattacccgctgtatcaacaccgccaaattgcctaaatcagttgttgctcttttttctcaccccggtgaactatctgcccggtcaggtgatgcacttcaaaaagcctttacagataaagaggaattacttaagcagcaggcatctaaccttcatgagcagaaaaaagctggggtgatatttgaagctgaagaagttatcactcttttaacttctgtgcttaaaacgtcatctgcatcaagaactagtttaagctcacgacatcagtttgctcctggagcgacagtattgtataagggcgataaaatggtgcttaacctggacaggtctcgtgttccaactgagtgtatagagaaaattgaggccattcttaaggaacttgaaaagccagcaccctgatgcgaccacgttttagtctacgtttatctgtctttacttaatgtcctttgttacaggccagaaagcataactggcctgaatattctctctgggcccactgttccacttgtatcgtcggtctgataatcagactgggaccacggtcccactcgtatcgtcggtctgattattagtctgggaccacggtcccactcgtatcgtcggtctgattattagtctgggaccacggtcccactcgtatcgtcggtctgataatcagactgggaccacggtcccactcgtatcgtcggtctgattattagtctgggaccatggtcccactcgtatcgtcggtctgattattagtctgggaccacggtcccactcgtatcgtcggtctgattattagtctggaaccacggtcccactcgtatcgtcggtctgattattagtctgggaccacggtcccactcgtatcgtcggtctgattattagtctgggaccacgatcccactcgtgttgtcggtctgattatcggtctgggaccacggtcccacttgtattgtcgatcagactatcagcgtgagactacgattccatcaatgcctgtcaagggcaagtattgacatgtcgtcgtaacctgtagaacggagtaacctcggtgtgcggttgtatgcctgctgtggattgctgctgtgtcctgcttatccacaacattttgcgcacggttatgtggacaaaatacctggttacccaggccgtgccggcacgttaaccgggctgcatccgatgcaagtgtgtcgctgtcgagttt

SEQ ID NO: 47 - DNA, 4047 bp, Artificial Sequence
  Description of Artificial Sequence: Synthetic polynucleotide
gacgtccatggggcaaatgcaaacatgtttgtttttcttgttttattgccactagtctctagtcagtgtgttaatcttacaaccagaactcaattaccccctgcatacactaattctttcacacgtggtgtttattaccctgacaaagttttcagatcctcagttttacattcaactcaggacttgttcttacctttcttttccaatgttacttggttccatgctatacatgtctctgggaccaatggtactaagaggtttgataaccctgtcctaccatttaatgatggtgtttattttgcttccactgagaagtctaacataataagaggctggatttttggtactactttagattcgaagacccagtccctacttattgttaataacgctactaatgttgttattaaagtctgtgaatttcaattttgtaatgatccatttttgggtgtttattaccacaaaaacaacaaaagttggatggaaagtgagttcagagtttattctagtgcgaataattgcacttttgaatatgtctctcagccttttcttatggaccttgaaggaaaacagggtaatttcaaaaatcttagggaatttgtgtttaagaatattgatggttattttaaaatatattctaagcacacgcctattaatttagtgcgtgatctccctcagggtttttcggctttagaaccattggtagatttgccaataggtattaacatcactaggtttcaaactttacttgctttacatagaagttatttgactcctggtgattcttcttcaggttggacagctggtgctgcagcttattatgtgggttatcttcaacctaggacttttctattaaaatataatgaaaatggaaccattacagatgctgtagactgtgcacttgaccctctctcagaaacaaagtgtacgttgaaatccttcactgtagaaaaaggaatctatcaaacttctaactttagagtccaaccaacagaatctattgttagatttcctaatattacaaacttgtgcccttttggtgaagtttttaacgccaccagatttgcatctgtttatgcttggaacaggaagagaatcagcaactgtgttgctgattattctgtcctatataattccgcatcattttccacttttaagtgttatggagtgtctcctactaaattaaatgatctctgctttactaatgtctatgcagattcatttgtaattagaggtgatgaagtcagacaaatcgctccagggcaaactggaaagattgctgattataattataaattaccagatgattttacaggctgcgttatagcttggaattctaacaatcttgattctaaggttggtggtaattataattacctgtatagattgtttaggaagtctaatctcaaaccttttgagagagatatttcaactgaaatctatcaggccggtagcacaccttgtaatggtgttgaaggttttaattgttactttcctttacaatcatatggtttccaacccactaatggtgttggttaccaaccatacagagtagtagtactttcttttgaacttctacatgcaccagcaactgtttgtggacctaaaaagtctactaatttggttaaaaacaaatgtgtcaatttcaacttcaatggtttaacaggcacaggtgttcttactgagtctaacaaaaagtttctgcctttccaacaatttggcagagacattgctgacactactgatgctgtccgtgatccacagacacttgagattcttgacattacaccatgttcttttggtggtgtcagtgttataacaccaggaacaaatacttctaaccaggttgctgttctttatcaggatgttaactgcacagaagtccctgttgctattcatgcagatcaacttactcctacttggcgtgtttattctacaggttctaatgtttttcaaacacgtgcaggctgtttaataggggctgaacatgtcaacaactcatatgagtgtgacatacccattggtgcaggtatatgcgctagttatcagactcagactaattctcctcggcgggcacgtagtgtagctagtcaatccatcattgcctacactatgtcacttggtgcagaaaattcagttgcttactctaataactctattgccatacccacaaattttactattagtgttaccacagaaattctaccagtgtctatgaccaagacatcagtagattgtacaatgtacatttgtggtgattcaactgaatgcagcaatcttttgttgcaatatggcagtttttgtacacaattaaaccgtgctttaactggaatagctgttgaacaagacaaaaacacccaagaagtttttgcacaagtcaaacaaatttacaaaacaccaccaattaaagattttggtggttttaatttttcacaaatattaccagatccatcaaaaccaagcaagaggtcatttattgaagatctacttttcaacaaagtgacacttgcagatgctggcttcatcaaacaatatggtgattgccttggtgatattgctgctagagacctcatttgtgcacaaaagtttaacggccttactgttttgccacctttgctcacagatgaaatgattgctcaatacacttctgcactgttagcgggtacaatcacttctggttggacctttggtgcaggtgctgcattacaaataccatttgctatgcaaatggcttataggtttaatggtattggagttacacagaatgttctctatgagaaccaaaaattgattgccaaccaatttaatagtgctattggcaaaattcaagactcactttcttccacagcaagtgcacttggaaaacttcaagatgtggtcaaccaaaatgcacaagctttaaacacgcttgttaaacaacttagctccaattttggtgcaatttcaagtgttttaaatgatatcctttcacgtcttgacaaagttgaggctgaagtgcaaattgataggttgatcacaggcagacttcaaagtttgcagacatatgtgactcaacaattaattagagctgcagaaatcagagcttctgctaatcttgctgctactaaaatgtcagagtgtgtacttggacaatcaaaaagagttgatttttgtggaaagggctatcatcttatgtccttccctcagtcagcacctcatggtgtagtcttcttgcatgtgacttatgtccctgcacaagaaaagaacttcacaactgctcctgccatttgtcatgatggaaaagcacactttcctcgtgaaggtgtctttgtttcaaatggcacacactggtttgtaacacaaaggaatttttatgaaccacaaatcattactacagacaacacatttgtgtctggtaactgtgatgttgtaataggaattgtcaacaacacagtttatgatcctttgcaacctgaattagactcattcaaggaggagttagataaatattttaagaatcatacatcaccagatgttgatttaggtgacatctctggcattaatgcttcagttgtaaacattcaaaaagaaattgaccgcctcaatgaggttgccaagaatttaaatgaatctctcatcgatctccaagaacttggaaagtatgagcagtatataaaatggccatggtacatttggctaggttttatagctggcttgattgccatagtaatggtgacaattatgctttgctgtatgaccagttgctgtagttgtctcaagggctgttgttcttgtggatcctgctgcaaggccagaagcacaccaatcacactaagcaaggatcaactgagtggtataaataatattgcatttagtaactaaataaaaatagcacctaatcatgttcttacaatggtttactatctgctcatagacaacccatctatcattggattttcttaaaatctgaacttcatcgaaactcttatctataaaccatctcacttacactatttaagtagattcctagtttatagttatataaaacacaattgaatgccagtcgac

SEQ ID NO: 48 - DNA, 4065 bp, Artificial Sequence
  Description of Artificial Sequence: Synthetic polynucleotide
gacgtccatggggcaaatgcaaacatgtttgtttttcttgttttattgccactagtctctagtcagtgtgttaatcttacaaccagaactcaattaccccctgcatacactaattctttcacacgtggtgtttattaccctgacaaagttttcagatcctcagttttacattcaactcaggacttgttcttacctttcttttccaatgttacttggttccatgctatacatgtctctgggaccaatggtactaagaggtttgataaccctgtcctaccatttaatgatggtgtttattttgcttccactgagaagtctaacataataagaggctggatttttggtactactttagattcgaagacccagtccctacttattgttaataacgctactaatgttgttattaaagtctgtgaatttcaattttgtaatgatccatttttgggtgtttattaccacaaaaacaacaaaagttggatggaaagtgagttcagagtttattctagtgcgaataattgcacttttgaatatgtctctcagccttttcttatggaccttgaaggaaaacagggtaatttcaaaaatcttagggaatttgtgtttaagaatattgatggttattttaaaatatattctaagcacacgcctattaatttagtgcgtgatctccctcagggtttttcggctttagaaccattggtagatttgccaataggtattaacatcactaggtttcaaactttacttgctttacatagaagttatttgactcctggtgattcttcttcaggttggacagctggtgctgcagcttattatgtgggttatcttcaacctaggacttttctattaaaatataatgaaaatggaaccattacagatgctgtagactgtgcacttgaccctctctcagaaacaaagtgtacgttgaaatccttcactgtagaaaaaggaatctatcaaacttctaactttagagtccaaccaacagaatctattgttagatttcctaatattacaaacttgtgcccttttggtgaagtttttaacgccaccagatttgcatctgtttatgcttggaacaggaagagaatcagcaactgtgttgctgattattctgtcctatataattccgcatcattttccacttttaagtgttatggagtgtctcctactaaattaaatgatctctgctttactaatgtctatgcagattcatttgtaattagaggtgatgaagtcagacaaatcgctccagggcaaactggaaagattgctgattataattataaattaccagatgattttacaggctgcgttatagcttggaattctaacaatcttgattctaaggttggtggtaattataattacctgtatagattgtttaggaagtctaatctcaaaccttttgagagagatatttcaactgaaatctatcaggccggtagcacaccttgtaatggtgttgaaggttttaattgttactttcctttacaatcatatggtttccaacccactaatggtgttggttaccaaccatacagagtagtagtactttcttttgaacttctacatgcaccagcaactgtttgtggacctaaaaagtctactaatttggttaaaaacaaatgtgtcaatttcaacttcaatggtttaacaggcacaggtgttcttactgagtctaacaaaaagtttctgcctttccaacaatttggcagagacattgctgacactactgatgctgtccgtgatccacagacacttgagattcttgacattacaccatgttcttttggtggtgtcagtgttataacaccaggaacaaatacttctaaccaggttgctgttctttatcaggatgttaactgcacagaagtccctgttgctattcatgcagatcaacttactcctacttggcgtgtttattctacaggttctaatgtttttcaaacacgtgcaggctgtttaataggggctgaacatgtcaacaactcatatgagtgtgacatacccattggtgcaggtatatgcgctagttatcagactcagactaattctcctcggcgggcacgtagtgtagctagtcaatccatcattgcctacactatgtcacttggtgcagaaaattcagttgcttactctaataactctattgccatacccacaaattttactattagtgttaccacagaaattctaccagtgtctatgaccaagacatcagtagattgtacaatgtacatttgtggtgattcaactgaatgcagcaatcttttgttgcaatatggcagtttttgtacacaattaaaccgtgctttaactggaatagctgttgaacaagacaaaaacacccaagaagtttttgcacaagtcaaacaaatttacaaaacaccaccaattaaagattttggtggttttaatttttcacaaatattaccagatccatcaaaaccaagcaagaggtcatttattgaagatctacttttcaacaaagtgacacttgcagatgctggcttcatcaaacaatatggtgattgccttggtgatattgctgctagagacctcatttgtgcacaaaagtttaacggccttactgttttgccacctttgctcacagatgaaatgattgctcaatacacttctgcactgttagcgggtacaatcacttctggttggacctttggtgcaggtgctgcattacaaataccatttgctatgcaaatggcttataggtttaatggtattggagttacacagaatgttctctatgagaaccaaaaattgattgccaaccaatttaatagtgctattggcaaaattcaagactcactttcttccacagcaagtgcacttggaaaacttcaagatgtggtcaaccaaaatgcacaagctttaaacacgcttgttaaacaacttagctccaattttggtgcaatttcaagtgttttaaatgatatcctttcacgtcttgacaaagttgaggctgaagtgcaaattgataggttgatcacaggcagacttcaaagtttgcagacatatgtgactcaacaattaattagagctgcagaaatcagagcttctgctaatcttgctgctactaaaatgtcagagtgtgtacttggacaatcaaaaagagttgatttttgtggaaagggctatcatcttatgtccttccctcagtcagcacctcatggtgtagtcttcttgcatgtgacttatgtccctgcacaagaaaagaacttcacaactgctcctgccatttgtcatgatggaaaagcacactttcctcgtgaaggtgtctttgtttcaaatggcacacactggtttgtaacacaaaggaatttttatgaaccacaaatcattactacagacaacacatttgtgtctggtaactgtgatgttgtaataggaattgtcaacaacacagtttatgatcctttgcaacctgaattagactcattcaaggaggagttagataaatattttaagaatcatacatcaccagatgttgatttaggtgacatctctggcattaatgcttcagttgtaaacattcaaaaagaaattgaccgcctcaatgaggttgccaagaatttaaatgaatctctcatcgatctccaagaacttggaaagtatgagcagtatataaaatggccatggtacatttggctaggttttatagctggcttgattgccatagtaatggtgacaattatgctttgctgtatgaccagttgctgtagttgtctcaagggctgttgttcttgtggatcctgctgcaaatttgatgaagacgacaaggccagaagcacaccaatcacactaagcaaggatcaactgagtggtataaataatattgcatttagtaactaaataaaaatagcacctaatcatgttcttacaatggtttactatctgctcatagacaacccatctatcattggattttcttaaaatctgaacttcatcgaaactcttatctataaaccatctcacttacactatttaagtagattcctagtttatagttatataaaacacaattgaatgccagtcgac

SEQ ID NO: 49 - DNA, 4083 bp, Artificial Sequence
  Description of Artificial Sequence: Synthetic polynucleotide
gacgtccatggggcaaatgcaaacatgtttgtttttcttgttttattgccactagtctctagtcagtgtgttaatcttacaaccagaactcaattaccccctgcatacactaattctttcacacgtggtgtttattaccctgacaaagttttcagatcctcagttttacattcaactcaggacttgttcttacctttcttttccaatgttacttggttccatgctatacatgtctctgggaccaatggtactaagaggtttgataaccctgtcctaccatttaatgatggtgtttattttgcttccactgagaagtctaacataataagaggctggatttttggtactactttagattcgaagacccagtccctacttattgttaataacgctactaatgttgttattaaagtctgtgaatttcaattttgtaatgatccatttttgggtgtttattaccacaaaaacaacaaaagttggatggaaagtgagttcagagtttattctagtgcgaataattgcacttttgaatatgtctctcagccttttcttatggaccttgaaggaaaacagggtaatttcaaaaatcttagggaatttgtgtttaagaatattgatggttattttaaaatatattctaagcacacgcctattaatttagtgcgtgatctccctcagggtttttcggctttagaaccattggtagatttgccaataggtattaacatcactaggtttcaaactttacttgctttacatagaagttatttgactcctggtgattcttcttcaggttggacagctggtgctgcagcttattatgtgggttatcttcaacctaggacttttctattaaaatataatgaaaatggaaccattacagatgctgtagactgtgcacttgaccctctctcagaaacaaagtgtacgttgaaatccttcactgtagaaaaaggaatctatcaaacttctaactttagagtccaaccaacagaatctattgttagatttcctaatattacaaacttgtgcccttttggtgaagtttttaacgccaccagatttgcatctgtttatgcttggaacaggaagagaatcagcaactgtgttgctgattattctgtcctatataattccgcatcattttccacttttaagtgttatggagtgtctcctactaaattaaatgatctctgctttactaatgtctatgcagattcatttgtaattagaggtgatgaagtcagacaaatcgctccagggcaaactggaaagattgctgattataattataaattaccagatgattttacaggctgcgttatagcttggaattctaacaatcttgattctaaggttggtggtaattataattacctgtatagattgtttaggaagtctaatctcaaaccttttgagagagatatttcaactgaaatctatcaggccggtagcacaccttgtaatggtgttgaaggttttaattgttactttcctttacaatcatatggtttccaacccactaatggtgttggttaccaaccatacagagtagtagtactttcttttgaacttctacatgcaccagcaactgtttgtggacctaaaaagtctactaatttggttaaaaacaaatgtgtcaatttcaacttcaatggtttaacaggcacaggtgttcttactgagtctaacaaaaagtttctgcctttccaacaatttggcagagacattgctgacactactgatgctgtccgtgatccacagacacttgagattcttgacattacaccatgttcttttggtggtgtcagtgttataacaccaggaacaaatacttctaaccaggttgctgttctttatcaggatgttaactgcacagaagtccctgttgctattcatgcagatcaacttactcctacttggcgtgtttattctacaggttctaatgtttttcaaacacgtgcaggctgtttaataggggctgaacatgtcaacaactcatatgagtgtgacatacccattggtgcaggtatatgcgctagttatcagactcagactaattctcctcggcgggcacgtagtgtagctagtcaatccatcattgcctacactatgtcacttggtgcagaaaattcagttgcttactctaataactctattgccatacccacaaattttactattagtgttaccacagaaattctaccagtgtctatgaccaagacatcagtagattgtacaatgtacatttgtggtgattcaactgaatgcagcaatcttttgttgcaatatggcagtttttgtacacaattaaaccgtgctttaactggaatagctgttgaacaagacaaaaacacccaagaagtttttgcacaagtcaaacaaatttacaaaacaccaccaattaaagattttggtggttttaatttttcacaaatattaccagatccatcaaaaccaagcaagaggtcatttattgaagatctacttttcaacaaagtgacacttgcagatgctggcttcatcaaacaatatggtgattgccttggtgatattgctgctagagacctcatttgtgcacaaaagtttaacggccttactgttttgccacctttgctcacagatgaaatgattgctcaatacacttctgcactgttagcgggtacaatcacttctggttggacctttggtgcaggtgctgcattacaaataccatttgctatgcaaatggcttataggtttaatggtattggagttacacagaatgttctctatgagaaccaaaaattgattgccaaccaatttaatagtgctattggcaaaattcaagactcactttcttccacagcaagtgcacttggaaaacttcaagatgtggtcaaccaaaatgcacaagctttaaacacgcttgttaaacaacttagctccaattttggtgcaatttcaagtgttttaaatgatatcctttcacgtcttgacaaagttgaggctgaagtgcaaattgataggttgatcacaggcagacttcaaagtttgcagacatatgtgactcaacaattaattagagctgcagaaatcagagcttctgctaatcttgctgctactaaaatgtcagagtgtgtacttggacaatcaaaaagagttgatttttgtggaaagggctatcatcttatgtccttccctcagtcagcacctcatggtgtagtcttcttgcatgtgacttatgtccctgcacaagaaaagaacttcacaactgctcctgccatttgtcatgatggaaaagcacactttcctcgtgaaggtgtctttgtttcaaatggcacacactggtttgtaacacaaaggaatttttatgaaccacaaatcattactacagacaacacatttgtgtctggtaactgtgatgttgtaataggaattgtcaacaacacagtttatgatcctttgcaacctgaattagactcattcaaggaggagttagataaatattttaagaatcatacatcaccagatgttgatttaggtgacatctctggcattaatgcttcagttgtaaacattcaaaaagaaattgaccgcctcaatgaggttgccaagaatttaaatgaatctctcatcgatctccaagaacttggaaagtatgagcagtatataaaatggccatggtacatttggctaggttttatagctggcttgattgccatagtaatggtgacaattatgctttgctgtatgaccagttgctgtagttgtctcaagggctgttgttcttgtggatcctgctgcaaatttgatgaagacgacggactgctcctatactgtaaggccagaagcacaccaatcacactaagcaaggatcaactgagtggtataaataatattgcatttagtaactaaataaaaatagcacctaatcatgttcttacaatggtttactatctgctcatagacaacccatctatcattggattttcttaaaatctgaacttcatcgaaactcttatctataaaccatctcacttacactatttaagtagattcctagtttatagttatataaaacacaattgaatgccagtcgac

SEQ ID NO: 50 - DNA, 4038 bp, Artificial Sequence
  Description of Artificial Sequence: Synthetic polynucleotide
gacgtccatggggcaaatgcaaacatgtttgtttttcttgttttattgccactagtctctagtcagtgtgttaatcttacaaccagaactcaattaccccctgcatacactaattctttcacacgtggtgtttattaccctgacaaagttttcagatcctcagttttacattcaactcaggacttgttcttacctttcttttccaatgttacttggttccatgctatacatgtctctgggaccaatggtactaagaggtttgataaccctgtcctaccatttaatgatggtgtttattttgcttccactgagaagtctaacataataagaggctggatttttggtactactttagattcgaagacccagtccctacttattgttaataacgctactaatgttgttattaaagtctgtgaatttcaattttgtaatgatccatttttgggtgtttattaccacaaaaacaacaaaagttggatggaaagtgagttcagagtttattctagtgcgaataattgcacttttgaatatgtctctcagccttttcttatggaccttgaaggaaaacagggtaatttcaaaaatcttagggaatttgtgtttaagaatattgatggttattttaaaatatattctaagcacacgcctattaatttagtgcgtgatctccctcagggtttttcggctttagaaccattggtagatttgccaataggtattaacatcactaggtttcaaactttacttgctttacatagaagttatttgactcctggtgattcttcttcaggttggacagctggtgctgcagcttattatgtgggttatcttcaacctaggacttttctattaaaatataatgaaaatggaaccattacagatgctgtagactgtgcacttgaccctctctcagaaacaaagtgtacgttgaaatccttcactgtagaaaaaggaatctatcaaacttctaactttagagtccaaccaacagaatctattgttagatttcctaatattacaaacttgtgcccttttggtgaagtttttaacgccaccagatttgcatctgtttatgcttggaacaggaagagaatcagcaactgtgttgctgattattctgtcctatataattccgcatcattttccacttttaagtgttatggagtgtctcctactaaattaaatgatctctgctttactaatgtctatgcagattcatttgtaattagaggtgatgaagtcagacaaatcgctccagggcaaactggaaagattgctgattataattataaattaccagatgattttacaggctgcgttatagcttggaattctaacaatcttgattctaaggttggtggtaattataattacctgtatagattgtttaggaagtctaatctcaaaccttttgagagagatatttcaactgaaatctatcaggccggtagcacaccttgtaatggtgttgaaggttttaattgttactttcctttacaatcatatggtttccaacccactaatggtgttggttaccaaccatacagagtagtagtactttcttttgaacttctacatgcaccagcaactgtttgtggacctaaaaagtctactaatttggttaaaaacaaatgtgtcaatttcaacttcaatggtttaacaggcacaggtgttcttactgagtctaacaaaaagtttctgcctttccaacaatttggcagagacattgctgacactactgatgctgtccgtgatccacagacacttgagattcttgacattacaccatgttcttttggtggtgtcagtgttataacaccaggaacaaatacttctaaccaggttgctgttctttatcaggatgttaactgcacagaagtccctgttgctattcatgcagatcaacttactcctacttggcgtgtttattctacaggttctaatgtttttcaaacacgtgcaggctgtttaataggggctgaacatgtcaacaactcatatgagtgtgacatacccattggtgcaggtatatgcgctagttatcagactcagactaattctcctcggcgggcacgtagtgtagctagtcaatccatcattgcctacactatgtcacttggtgcagaaaattcagttgcttactctaataactctattgccatacccacaaattttactattagtgttaccacagaaattctaccagtgtctatgaccaagacatcagtagattgtacaatgtacatttgtggtgattcaactgaatgcagcaatcttttgttgcaatatggcagtttttgtacacaattaaaccgtgctttaactggaatagctgttgaacaagacaaaaacacccaagaagtttttgcacaagtcaaacaaatttacaaaacaccaccaattaaagattttggtggttttaatttttcacaaatattaccagatccatcaaaaccaagcaagaggtcatttattgaagatctacttttcaacaaagtgacacttgcagatgctggcttcatcaaacaatatggtgattgccttggtgatattgctgctagagacctcatttgtgcacaaaagtttaacggccttactgttttgccacctttgctcacagatgaaatgattgctcaatacacttctgcactgttagcgggtacaatcacttctggttggacctttggtgcaggtgctgcattacaaataccatttgctatgcaaatggcttataggtttaatggtattggagttacacagaatgttctctatgagaaccaaaaattgattgccaaccaatttaatagtgctattggcaaaattcaagactcactttcttccacagcaagtgcacttggaaaacttcaagatgtggtcaaccaaaatgcacaagctttaaacacgcttgttaaacaacttagctccaattttggtgcaatttcaagtgttttaaatgatatcctttcacgtcttgacaaagttgaggctgaagtgcaaattgataggttgatcacaggcagacttcaaagtttgcagacatatgtgactcaacaattaattagagctgcagaaatcagagcttctgctaatcttgctgctactaaaatgtcagagtgtgtacttggacaatcaaaaagagttgatttttgtggaaagggctatcatcttatgtccttccctcagtcagcacctcatggtgtagtcttcttgcatgtgacttatgtccctgcacaagaaaagaacttcacaactgctcctgccatttgtcatgatggaaaagcacactttcctcgtgaaggtgtctttgtttcaaatggcacacactggtttgtaacacaaaggaatttttatgaaccacaaatcattactacagacaacacatttgtgtctggtaactgtgatgttgtaataggaattgtcaacaacacagtttatgatcctttgcaacctgaattagactcattcaaggaggagttagataaatattttaagaatcatacatcaccagatgttgatttaggtgacatctctggcattaatgcttcagttgtaaacattcaaaaagaaattgaccgcctcaatgaggttgccaagaatttaaatgaatctctcatcgatctccaagaacttggaaagtatgagcagtatataaaatggccatggtacatttggctaggttttatagctggcttgattgccatagtaatggtgacaattatgctttgctgtatgaccagttgctgtagttgtctcaagggactgctcctatactgtaaggccagaagcacaccaatcacactaagcaaggatcaactgagtggtataaataatattgcatttagtaactaaataaaaatagcacctaatcatgttcttacaatggtttactatctgctcatagacaacccatctatcattggattttcttaaaatctgaacttcatcgaaactcttatctataaaccatctcacttacactatttaagtagattcctagtttatagttatataaaacacaattgaatgccagtcgac

SEQ ID NO: 51 - DNA, 4017 bp, Artificial Sequence
  Description of Artificial Sequence: Synthetic polynucleotide
gacgtccatggggcaaatgcaaacatgtttgtttttcttgttttattgccactagtctctagtcagtgtgttaatcttacaaccagaactcaattaccccctgcatacactaattctttcacacgtggtgtttattaccctgacaaagttttcagatcctcagttttacattcaactcaggacttgttcttacctttcttttccaatgttacttggttccatgctatacatgtctctgggaccaatggtactaagaggtttgataaccctgtcctaccatttaatgatggtgtttattttgcttccactgagaagtctaacataataagaggctggatttttggtactactttagattcgaagacccagtccctacttattgttaataacgctactaatgttgttattaaagtctgtgaatttcaattttgtaatgatccatttttgggtgtttattaccacaaaaacaacaaaagttggatggaaagtgagttcagagtttattctagtgcgaataattgcacttttgaatatgtctctcagccttttcttatggaccttgaaggaaaacagggtaatttcaaaaatcttagggaatttgtgtttaagaatattgatggttattttaaaatatattctaagcacacgcctattaatttagtgcgtgatctccctcagggtttttcggctttagaaccattggtagatttgccaataggtattaacatcactaggtttcaaactttacttgctttacatagaagttatttgactcctggtgattcttcttcaggttggacagctggtgctgcagcttattatgtgggttatcttcaacctaggacttttctattaaaatataatgaaaatggaaccattacagatgctgtagactgtgcacttgaccctctctcagaaacaaagtgtacgttgaaatccttcactgtagaaaaaggaatctatcaaacttctaactttagagtccaaccaacagaatctattgttagatttcctaatattacaaacttgtgcccttttggtgaagtttttaacgccaccagatttgcatctgtttatgcttggaacaggaagagaatcagcaactgtgttgctgattattctgtcctatataattccgcatcattttccacttttaagtgttatggagtgtctcctactaaattaaatgatctctgctttactaatgtctatgcagattcatttgtaattagaggtgatgaagtcagacaaatcgctccagggcaaactggaaagattgctgattataattataaattaccagatgattttacaggctgcgttatagcttggaattctaacaatcttgattctaaggttggtggtaattataattacctgtatagattgtttaggaagtctaatctcaaaccttttgagagagatatttcaactgaaatctatcaggccggtagcacaccttgtaatggtgttgaaggttttaattgttactttcctttacaatcatatggtttccaacccactaatggtgttggttaccaaccatacagagtagtagtactttcttttgaacttctacatgcaccagcaactgtttgtggacctaaaaagtctactaatttggttaaaaacaaatgtgtcaatttcaacttcaatggtttaacaggcacaggtgttcttactgagtctaacaaaaagtttctgcctttccaacaatttggcagagacattgctgacactactgatgctgtccgtgatccacagacacttgagattcttgacattacaccatgttcttttggtggtgtcagtgttataacaccaggaacaaatacttctaaccaggttgctgttctttatcaggatgttaactgcacagaagtccctgttgctattcatgcagatcaacttactcctacttggcgtgtttattctacaggttctaatgtttttcaaacacgtgcaggctgtttaataggggctgaacatgtcaacaactcatatgagtgtgacatacccattggtgcaggtatatgcgctagttatcagactcagactaattctcctcggcgggcacgtagtgtagctagtcaatccatcattgcctacactatgtcacttggtgcagaaaattcagttgcttactctaataactctattgccatacccacaaattttactattagtgttaccacagaaattctaccagtgtctatgaccaagacatcagtagattgtacaatgtacatttgtggtgattcaactgaatgcagcaatcttttgttgcaatatggcagtttttgtacacaattaaaccgtgctttaactggaatagctgttgaacaagacaaaaacacccaagaagtttttgcacaagtcaaacaaatttacaaaacaccaccaattaaagattttggtggttttaatttttcacaaatattaccagatccatcaaaaccaagcaagaggtcatttattgaagatctacttttcaacaaagtgacacttgcagatgctggcttcatcaaacaatatggtgattgccttggtgatattgctgctagagacctcatttgtgcacaaaagtttaacggccttactgttttgccacctttgctcacagatgaaatgattgctcaatacacttctgcactgttagcgggtacaatcacttctggttggacctttggtgcaggtgctgcattacaaataccatttgctatgcaaatggcttataggtttaatggtattggagttacacagaatgttctctatgagaaccaaaaattgattgccaaccaatttaatagtgctattggcaaaattcaagactcactttcttccacagcaagtgcacttggaaaacttcaagatgtggtcaaccaaaatgcacaagctttaaacacgcttgttaaacaacttagctccaattttggtgcaatttcaagtgttttaaatgatatcctttcacgtcttgacaaagttgaggctgaagtgcaaattgataggttgatcacaggcagacttcaaagtttgcagacatatgtgactcaacaattaattagagctgcagaaatcagagcttctgctaatcttgctgctactaaaatgtcagagtgtgtacttggacaatcaaaaagagttgatttttgtggaaagggctatcatcttatgtccttccctcagtcagcacctcatggtgtagtcttcttgcatgtgacttatgtccctgcacaagaaaagaacttcacaactgctcctgccatttgtcatgatggaaaagcacactttcctcgtgaaggtgtctttgtttcaaatggcacacactggtttgtaacacaaaggaatttttatgaaccacaaatcattactacagacaacacatttgtgtctggtaactgtgatgttgtaataggaattgtcaacaacacagtttatgatcctttgcaacctgaattagactcattcaaggaggagttagataaatattttaagaatcatacatcaccagatgttgatttaggtgacatctctggcattaatgcttcagttgtaaacattcaaaaagaaattgaccgcctcaatgaggttgccaagaatttaaatgaatctctcatcgatctccaagaacttggaaagtatgagcagtatataaaatggccatggtacatttggctaggttttatagctggcttgattgccatagtaatggtgacaattatgctttgctgtatgaccagttgctgtagttgtctcaaggccagaagcacaccaatcacactaagcaaggatcaactgagtggtataaataatattgcatttagtaactaaataaaaatagcacctaatcatgttcttacaatggtttactatctgctcatagacaacccatctatcattggattttcttaaaatctgaacttcatcgaaactcttatctataaaccatctcacttacactatttaagtagattcctagtttatagttatataaaacacaattgaatgccagtcgac

SEQ ID NO: 52 - DNA, 4026 bp, Artificial Sequence
  Description of Artificial Sequence: Synthetic polynucleotide
gacgtccatggggcaaatgcaaacatgtttgtttttcttgttttattgccactagtctctagtcagtgtgttaatcttacaaccagaactcaattaccccctgcatacactaattctttcacacgtggtgtttattaccctgacaaagttttcagatcctcagttttacattcaactcaggacttgttcttacctttcttttccaatgttacttggttccatgctatacatgtctctgggaccaatggtactaagaggtttgataaccctgtcctaccatttaatgatggtgtttattttgcttccactgagaagtctaacataataagaggctggatttttggtactactttagattcgaagacccagtccctacttattgttaataacgctactaatgttgttattaaagtctgtgaatttcaattttgtaatgatccatttttgggtgtttattaccacaaaaacaacaaaagttggatggaaagtgagttcagagtttattctagtgcgaataattgcacttttgaatatgtctctcagccttttcttatggaccttgaaggaaaacagggtaatttcaaaaatcttagggaatttgtgtttaagaatattgatggttattttaaaatatattctaagcacacgcctattaatttagtgcgtgatctccctcagggtttttcggctttagaaccattggtagatttgccaataggtattaacatcactaggtttcaaactttacttgctttacatagaagttatttgactcctggtgattcttcttcaggttggacagctggtgctgcagcttattatgtgggttatcttcaacctaggacttttctattaaaatataatgaaaatggaaccattacagatgctgtagactgtgcacttgaccctctctcagaaacaaagtgtacgttgaaatccttcactgtagaaaaaggaatctatcaaacttctaactttagagtccaaccaacagaatctattgttagatttcctaatattacaaacttgtgcccttttggtgaagtttttaacgccaccagatttgcatctgtttatgcttggaacaggaagagaatcagcaactgtgttgctgattattctgtcctatataattccgcatcattttccacttttaagtgttatggagtgtctcctactaaattaaatgatctctgctttactaatgtctatgcagattcatttgtaattagaggtgatgaagtcagacaaatcgctccagggcaaactggaaagattgctgattataattataaattaccagatgattttacaggctgcgttatagcttggaattctaacaatcttgattctaaggttggtggtaattataattacctgtatagattgtttaggaagtctaatctcaaaccttttgagagagatatttcaactgaaatctatcaggccggtagcacaccttgtaatggtgttgaaggttttaattgttactttcctttacaatcatatggtttccaacccactaatggtgttggttaccaaccatacagagtagtagtactttcttttgaacttctacatgcaccagcaactgtttgtggacctaaaaagtctactaatttggttaaaaacaaatgtgtcaatttcaacttcaatggtttaacaggcacaggtgttcttactgagtctaacaaaaagtttctgcctttccaacaatttggcagagacattgctgacactactgatgctgtccgtgatccacagacacttgagattcttgacattacaccatgttcttttggtggtgtcagtgttataacaccaggaacaaatacttctaaccaggttgctgttctttatcaggatgttaactgcacagaagtccctgttgctattcatgcagatcaacttactcctacttggcgtgtttattctacaggttctaatgtttttcaaacacgtgcaggctgtttaataggggctgaacatgtcaacaactcatatgagtgtgacatacccattggtgcaggtatatgcgctagttatcagactcagactaattctcctcggcgggcacgtagtgtagctagtcaatccatcattgcctacactatgtcacttggtgcagaaaattcagttgcttactctaataactctattgccatacccacaaattttactattagtgttaccacagaaattctaccagtgtctatgaccaagacatcagtagattgtacaatgtacatttgtggtgattcaactgaatgcagcaatcttttgttgcaatatggcagtttttgtacacaattaaaccgtgctttaactggaatagctgttgaacaagacaaaaacacccaagaagtttttgcacaagtcaaacaaatttacaaaacaccaccaattaaagattttggtggttttaatttttcacaaatattaccagatccatcaaaaccaagcaagaggtcatttattgaagatctacttttcaacaaagtgacacttgcagatgctggcttcatcaaacaatatggtgattgccttggtgatattgctgctagagacctcatttgtgcacaaaagtttaacggccttactgttttgccacctttgctcacagatgaaatgattgctcaatacacttctgcactgttagcgggtacaatcacttctggttggacctttggtgcaggtgctgcattacaaataccatttgctatgcaaatggcttataggtttaatggtattggagttacacagaatgttctctatgagaaccaaaaattgattgccaaccaatttaatagtgctattggcaaaattcaagactcactttcttccacagcaagtgcacttggaaaacttcaagatgtggtcaaccaaaatgcacaagctttaaacacgcttgttaaacaacttagctccaattttggtgcaatttcaagtgttttaaatgatatcctttcacgtcttgacaaagttgaggctgaagtgcaaattgataggttgatcacaggcagacttcaaagtttgcagacatatgtgactcaacaattaattagagctgcagaaatcagagcttctgctaatcttgctgctactaaaatgtcagagtgtgtacttggacaatcaaaaagagttgatttttgtggaaagggctatcatcttatgtccttccctcagtcagcacctcatggtgtagtcttcttgcatgtgacttatgtccctgcacaagaaaagaacttcacaactgctcctgccatttgtcatgatggaaaagcacactttcctcgtgaaggtgtctttgtttcaaatggcacacactggtttgtaacacaaaggaatttttatgaaccacaaatcattactacagacaacacatttgtgtctggtaactgtgatgttgtaataggaattgtcaacaacacagtttatgatcctttgcaacctgaattagactcattcaaggaggagttagataaatattttaagaatcatacatcaccagatgttgatttaggtgacatctctggcattaatgcttcagttgtaaacattcaaaaagaaattgaccgcctcaatgaggttgccaagaatttaaatgaatctctcatcgatctccaagaacttggaaagtatgagcagtatataaaatggccatggtacatttggctaggttttatagctggcttgattgccatagtaatggtgacaattatgctttgctgtatgaccagttgctgtagttgtctcaagtactgtaaggccagaagcacaccaatcacactaagcaaggatcaactgagtggtataaataatattgcatttagtaactaaataaaaatagcacctaatcatgttcttacaatggtttactatctgctcatagacaacccatctatcattggattttcttaaaatctgaacttcatcgaaactcttatctataaaccatctcacttacactatttaagtagattcctagtttatagttatataaaacacaattgaatgccagtcgac

SEQ ID NO: 53 - DNA, 4032 bp, Artificial Sequence
  Description of Artificial Sequence: Synthetic polynucleotide
gacgtccatggggcaaatgcaaacatgtttgtttttcttgttttattgccactagtctctagtcagtgtgttaatcttacaaccagaactcaattaccccctgcatacactaattctttcacacgtggtgtttattaccctgacaaagttttcagatcctcagttttacattcaactcaggacttgttcttacctttcttttccaatgttacttggttccatgctatacatgtctctgggaccaatggtactaagaggtttgataaccctgtcctaccatttaatgatggtgtttattttgcttccactgagaagtctaacataataagaggctggatttttggtactactttagattcgaagacccagtccctacttattgttaataacgctactaatgttgttattaaagtctgtgaatttcaattttgtaatgatccatttttgggtgtttattaccacaaaaacaacaaaagttggatggaaagtgagttcagagtttattctagtgcgaataattgcacttttgaatatgtctctcagccttttcttatggaccttgaaggaaaacagggtaatttcaaaaatcttagggaatttgtgtttaagaatattgatggttattttaaaatatattctaagcacacgcctattaatttagtgcgtgatctccctcagggtttttcggctttagaaccattggtagatttgccaataggtattaacatcactaggtttcaaactttacttgctttacatagaagttatttgactcctggtgattcttcttcaggttggacagctggtgctgcagcttattatgtgggttatcttcaacctaggacttttctattaaaatataatgaaaatggaaccattacagatgctgtagactgtgcacttgaccctctctcagaaacaaagtgtacgttgaaatccttcactgtagaaaaaggaatctatcaaacttctaactttagagtccaaccaacagaatctattgttagatttcctaatattacaaacttgtgcccttttggtgaagtttttaacgccaccagatttgcatctgtttatgcttggaacaggaagagaatcagcaactgtgttgctgattattctgtcctatataattccgcatcattttccacttttaagtgttatggagtgtctcctactaaattaaatgatctctgctttactaatgtctatgcagattcatttgtaattagaggtgatgaagtcagacaaatcgctccagggcaaactggaaagattgctgattataattataaattaccagatgattttacaggctgcgttatagcttggaattctaacaatcttgattctaaggttggtggtaattataattacctgtatagattgtttaggaagtctaatctcaaaccttttgagagagatatttcaactgaaatctatcaggccggtagcacaccttgtaatggtgttgaaggttttaattgttactttcctttacaatcatatggtttccaacccactaatggtgttggttaccaaccatacagagtagtagtactttcttttgaacttctacatgcaccagcaactgtttgtggacctaaaaagtctactaatttggttaaaaacaaatgtgtcaatttcaacttcaatggtttaacaggcacaggtgttcttactgagtctaacaaaaagtttctgcctttccaacaatttggcagagacattgctgacactactgatgctgtccgtgatccacagacacttgagattcttgacattacaccatgttcttttggtggtgtcagtgttataacaccaggaacaaatacttctaaccaggttgctgttctttatcaggatgttaactgcacagaagtccctgttgctattcatgcagatcaacttactcctacttggcgtgtttattctacaggttctaatgtttttcaaacacgtgcaggctgtttaataggggctgaacatgtcaacaactcatatgagtgtgacatacccattggtgcaggtatatgcgctagttatcagactcagactaattctcctcggcgggcacgtagtgtagctagtcaatccatcattgcctacactatgtcacttggtgcagaaaattcagttgcttactctaataactctattgccatacccacaaattttactattagtgttaccacagaaattctaccagtgtctatgaccaagacatcagtagattgtacaatgtacatttgtggtgattcaactgaatgcagcaatcttttgttgcaatatggcagtttttgtacacaattaaaccgtgctttaactggaatagctgttgaacaagacaaaaacacccaagaagtttttgcacaagtcaaacaaatttacaaaacaccaccaattaaagattttggtggttttaatttttcacaaatattaccagatccatcaaaaccaagcaagaggtcatttattgaagatctacttttcaacaaagtgacacttgcagatgctggcttcatcaaacaatatggtgattgccttggtgatattgctgctagagacctcatttgtgcacaaaagtttaacggccttactgttttgccacctttgctcacagatgaaatgattgctcaatacacttctgcactgttagcgggtacaatcacttctggttggacctttggtgcaggtgctgcattacaaataccatttgctatgcaaatggcttataggtttaatggtattggagttacacagaatgttctctatgagaaccaaaaattgattgccaaccaatttaatagtgctattggcaaaattcaagactcactttcttccacagcaagtgcacttggaaaacttcaagatgtggtcaaccaaaatgcacaagctttaaacacgcttgttaaacaacttagctccaattttggtgcaatttcaagtgttttaaatgatatcctttcacgtcttgacaaagttgaggctgaagtgcaaattgataggttgatcacaggcagacttcaaagtttgcagacatatgtgactcaacaattaattagagctgcagaaatcagagcttctgctaatcttgctgctactaaaatgtcagagtgtgtacttggacaatcaaaaagagttgatttttgtggaaagggctatcatcttatgtccttccctcagtcagcacctcatggtgtagtcttcttgcatgtgacttatgtccctgcacaagaaaagaacttcacaactgctcctgccatttgtcatgatggaaaagcacactttcctcgtgaaggtgtctttgtttcaaatggcacacactggtttgtaacacaaaggaatttttatgaaccacaaatcattactacagacaacacatttgtgtctggtaactgtgatgttgtaataggaattgtcaacaacacagtttatgatcctttgcaacctgaattagactcattcaaggaggagttagataaatattttaagaatcatacatcaccagatgttgatttaggtgacatctctggcattaatgcttcagttgtaaacattcaaaaagaaattgaccgcctcaatgaggttgccaagaatttaaatgaatctctcatcgatctccaagaacttggaaagtatgagcagtatataaaatggccatggtacatttggctaggttttatagctggcttgattgccatagtaatggtgacaattatgctttgctgtatgaccagttgctgtagttgtctcaagggctgttgttcttgtggatcctgctgcaaatttgatgaagacgactctgagccagtgctcaaaggagtcaaattacattacacataaataaaaatagcacctaatcatgttcttacaatggtttactatctgctcatagacaacccatctatcattggattttcttaaaatctgaacttcatcgaaactcttatctataaaccatctcacttacactatttaagtagattcctagtttatagttatataaaacacaattgaatgccagtcgac

SEQ ID NO: 54 - DNA, 23416 bp, Artificial Sequence
  Description of Artificial Sequence: Synthetic polynucleotide
aaacggatccttcgaaacgaaattaatacgactcactatagggaagtttttcgcgtctgatgaggccgttaggccgaaactcctctccggagtcacgcgaaaaaatgcgtacaacaaacttgcataaaccaaaaaaatggggcaaataagaatttgataagtaccacttaaatttaactcccttgcttagcgatggtgagcgagctgattaaggagaacatgcacatgaagctgtacatggagggcaccgtgaacaaccaccacttcaagtgcacatccgagggcgaaggcaagccctacgagggcacccagaccatgagaatcaaggcggtcgagggcggccctctccccttcgccttcgacatcctggctaccagcttcatgtacggcagcaaaaccttcatcaaccacacccagggcatccccgacttctttaagcagtccttccccgagggcttcacatgggagagagtcaccacatacgaagacgggggcgtgctgaccgctacccaggacaccagcctccaggacggctgcctcatctacaacgtcaagatcagaggggtgaacttcccatccaacggccctgtgatgcagaagaaaacactcggctgggaggcctccaccgagaccctgtaccccgctgacggcggcctggaaggcagagccgacatggccctgaagctcgtgggcgggggccacctgatctgcaacttgaagaccacatacagatccaagaaacccgctaagaacctcaagatgcccggcgtctactatgtggacagaagactggaaagaatcaaggaggccgacaaagagacctacgtcgagcagcacgaggtggctgtggccagatactgcgacctccctagcaaactggggcacagatgagtattcaattatagttattaaaaacttaacagaagacaaaaatggggcaaataagaatttgataagtaccacttaaatttaactcccttgcttagcgatgggttcgaattcgctatcgatgataaaagtacgtctacaaaatctatttgataatgatgaagtagcgctactaaaaataacgtgttatacggataaactaatacatctaacgaatgcgctagcgaaagcggtaatacatacgataaaactaaatggtatagtatttgtacatgtaataacgtcgtcggatatatgtccgaataataatatagtagtaaaatcgaattttacgacgatgccggtactacaaaatggtggttatatatgggaaatgatggaactaacgcattgttcgcaaccgaatggtctactagatgataattgtgaaataaaattttcgaaaaaactatcggattcgacgatgacgaattatatgaatcaactatcggaactactaggttttgatctaaatccgtaaattataattaatatcaactagcaaatcaatgtcactaacaccattagttaatataaaacttaacagaagacaaaaatggggcaaataaatcaattcagccaacccaaccatggatacgacgcataatgataatacgccgcaacgtctaatgataacggatatgcgtccgctatcgctagaaacgataataacgtcgctaacgcgtgatataataacgcataaatttatatatctaataaatcatgaatgtatagtacgtaaactagatgaacgtcaagcgacgtttacgtttctagtaaattatgaaatgaaactactacataaagtaggttcgacgaaatataaaaaatatacggaatataatacgaaatatggtacgtttccgatgccgatatttataaatcatgatggttttctagaatgtataggtataaaaccgacgaaacatacgccgataatatataaatatgatctaaatccgtaaatttcaacacaatattcacacaatctaaaacaacaactctatgcataactatactccatagtccagatggagcctgaaaattatagtaatttaaaattaaggagagatataagatagaagatggggcaaatacaaagatggctcttagcaaagtcaagttgaatgatacactcaacaaagatcaacttctgtcatccagcaaatacaccatccaacggagcacaggagatagtattgatactcctaattatgatgtgcagaaacacatcaataagttatgtggcatgttattaatcacagaagatgctaatcataaattcactgggttaataggtatgttatatgcgatgtctaggttaggaagagaagacaccataaaaatactcagagatgcgggatatcatgtaaaagcaaatggagtagatgtaacaacacatcgtcaagacattaatggaaaagaaatgaaatttgaagtgttaacattggcaagcttaacaactgaaattcaaatcaacattgagatagaatctagaaaatcctacaaaaaaatgctaaaagaaatgggagaggtagctccagaatacaggcatgactctcctgattgtgggatgataatattatgtatagcagcattagtaataactaaattagcagcaggggacagatctggtcttacagccgtgattaggagagctaataatgtcctaaaaaatgaaatgaaacgttacaaaggcttactacccaaggacatagccaacagcttctatgaagtgtttgaaaaacatccccactttatagatgtttttgttcattttggtatagcacaatcttctaccagaggtggcagtagagttgaagggatttttgcaggattgtttatgaatgcctatggtgcagggcaagtgatgttacggtggggagtcttagcaaaatcagttaaaaatattatgttaggacatgctagtgtgcaagcagaaatggaacaagttgttgaggtttatgaatatgcccaaaaattgggtggtgaagcaggattctaccatatattgaacaacccaaaagcatcattattatctttgactcaatttcctcacttctccagtgtagtattaggcaatgctgctggcctaggcataatgggagagtacagaggtacaccgaggaatcaagatctatatgatgcagcaaaggcatatgctgaacaactcaaagaaaatggtgtgattaactacagtgtactagacttgacagcagaagaactagaggctatcaaacatcagcttaatccaaaagataatgatgtagagctttgagttaataaaaaatggggcaaataaatcatcatggaaaagtttgctcctgaattccatggagaagatgcaaacaacagggctactaaattcctagaatcaataaagggcaaattcacatcacccaaagatcccaagaaaaaagatagtatcatatctgtcaactcaatagatatagaagtaaccaaagaaagccctataacatcaaattcaactattatcaacccaacaaatgagacagatgatactgcagggaacaagcccaattatcaaagaaaacctctagtaagtttcaaagaagaccctacaccaagtgataatcccttttctaaactatacaaagaaaccatagaaacatttgataacaatgaagaagaatccagctattcatacgaagaaataaatgatcagacaaacgataatataacagcaagattagataggattgatgaaaaattaagtgaaatactaggaatgcttcacacattagtagtggcaagtgcaggacctacatctgctcgggatggtataagagatgccatgattggtttaagagaagaaatgatagaaaaaatcagaactgaagcattaatgaccaatgacagattagaagctatggcaagactcaggaatgaggaaagtgaaaagatggcaaaagacacatcagatgaagtgtctctcaatccaacatcagagaaattgaacaacctattggaagggaatgatagtgacaatgatctatcacttgaagatttctgattagttaccactcttcacatcaacacacaataccaacagaagaccaacaaactaaccaacccaatcatccaaccaaacatccatccgccaatcagccaaacagccaacaaaacaaccagccaatccaaaactaaccacccggaaaaaatctataatatagttacaaaaaaaggaaagggtggggcaaatatggaaacatacgtgaacaagcttcacgaaggctccacatacacagctgctgttcaatacaatgtcttagaaaaagacgatgaccctgcatcacttacaatatgggtgcccatgttccaatcatctatgccagcagatttacttataaaagaactagctaatgtcaacatactagtgaaacaaatatccacacccaagggaccttcactaagagtcatgataaactcaagaagtgcagtgctagcacaaatgcccagcaaatttaccatatgcgctaatgtgtccttggatgaaagaagcaaactagcatatgatgtaaccacaccctgtgaaatcaaggcatgtagtctaacatgcctaaaatcaaaaaatatgttgactacagttaaagatctcactatgaagacactcaaccctacacatgatattattgctttatgtgaatttgaaaacatagtaacatcaaaaaaagtcataataccaacatacctaagatccatcagtgtcagaaataaagatctgaacacacttgaaaatataacaaccactgaattcaaaaatgctatcacaaatgcaaaaatcatcccttactcaggattactattagtcatcacagtgactgacaacaaaggagcattcaaatacataaagccacaaagtcaattcatagtagatcttggagcttacctagaaaaagaaagtatatattatgttaccacaaattggaagcacacagctacacgatttgcaatcaaacccatggaagattaacctttttcctctacatcagtgtgttaattcatacaaactttctacctacattcttcacttcaccatcacaatcacaaacactctgtggttcaaccaatcaaacaaaacttatctgaagtcccagatcatcccaagtcattgtttatcagatctagtactcaaataagttaataaaaaatatacacatggacgtccatggggcaaatgcaaacatgtttgtttttcttgttttattgccactagtctctagtcagtgtgttaatcttacaaccagaactcaattaccccctgcatacactaattctttcacacgtggtgtttattaccctgacaaagttttcagatcctcagttttacattcaactcaggacttgttcttacctttcttttccaatgttacttggttccatgctatacatgtctctgggaccaatggtactaagaggtttgataaccctgtcctaccatttaatgatggtgtttattttgcttccactgagaagtctaacataataagaggctggatttttggtactactttagattcgaagacccagtccctacttattgttaataacgctactaatgttgttattaaagtctgtgaatttcaattttgtaatgatccatttttgggtgtttattaccacaaaaacaacaaaagttggatggaaagtgagttcagagtttattctagtgcgaataattgcacttttgaatatgtctctcagccttttcttatggaccttgaaggaaaacagggtaatttcaaaaatcttagggaatttgtgtttaagaatattgatggttattttaaaatatattctaagcacacgcctattaatttagtgcgtgatctccctcagggtttttcggctttagaaccattggtagatttgccaataggtattaacatcactaggtttcaaactttacttgctttacatagaagttatttgactcctggtgattcttcttcaggttggacagctggtgctgcagcttattatgtgggttatcttcaacctaggacttttctattaaaatataatgaaaatggaaccattacagatgctgtagactgtgcacttgaccctctctcagaaacaaagtgtacgttgaaatccttcactgtagaaaaaggaatctatcaaacttctaactttagagtccaaccaacagaatctattgttagatttcctaatattacaaacttgtgcccttttggtgaagtttttaacgccaccagatttgcatctgtttatgcttggaacaggaagagaatcagcaactgtgttgctgattattctgtcctatataattccgcatcattttccacttttaagtgttatggagtgtctcctactaaattaaatgatctctgctttactaatgtctatgcagattcatttgtaattagaggtgatgaagtcagacaaatcgctccagggcaaactggaaagattgctgattataattataaattaccagatgattttacaggctgcgttatagcttggaattctaacaatcttgattctaaggttggtggtaattataattacctgtatagattgtttaggaagtctaatctcaaaccttttgagagagatatttcaactgaaatctatcaggccggtagcacaccttgtaatggtgttgaaggttttaattgttactttcctttacaatcatatggtttccaacccactaatggtgttggttaccaaccatacagagtagtagtactttcttttgaacttctacatgcaccagcaactgtttgtggacctaaaaagtctactaatttggttaaaaacaaatgtgtcaatttcaacttcaatggtttaacaggcacaggtgttcttactgagtctaacaaaaagtttctgcctttccaacaatttggcagagacattgctgacactactgatgctgtccgtgatccacagacacttgagattcttgacattacaccatgttcttttggtggtgtcagtgttataacaccaggaacaaatacttctaaccaggttgctgttctttatcaggatgttaactgcacagaagtccctgttgctattcatgcagatcaacttactcctacttggcgtgtttattctacaggttctaatgtttttcaaacacgtgcaggctgtttaataggggctgaacatgtcaacaactcatatgagtgtgacatacccattggtgcaggtatatgcgctagttatcagactcagactaattctcctcggcgggcacgtagtgtagctagtcaatccatcattgcctacactatgtcacttggtgcagaaaattcagttgcttactctaataactctattgccatacccacaaattttactattagtgttaccacagaaattctaccagtgtctatgaccaagacatcagtagattgtacaatgtacatttgtggtgattcaactgaatgcagcaatcttttgttgcaatatggcagtttttgtacacaattaaaccgtgctttaactggaatagctgttgaacaagacaaaaacacccaagaagtttttgcacaagtcaaacaaatttacaaaacaccaccaattaaagattttggtggttttaatttttcacaaatattaccagatccatcaaaaccaagcaagaggtcatttattgaagatctacttttcaacaaagtgacacttgcagatgctggcttcatcaaacaatatggtgattgccttggtgatattgctgctagagacctcatttgtgcacaaaagtttaacggccttactgttttgccacctttgctcacagatgaaatgattgctcaatacacttctgcactgttagcgggtacaatcacttctggttggacctttggtgcaggtgctgcattacaaataccatttgctatgcaaatggcttataggtttaatggtattggagttacacagaatgttctctatgagaaccaaaaattgattgccaaccaatttaatagtgctattggcaaaattcaagactcactttcttccacagcaagtgcacttggaaaacttcaagatgtggtcaaccaaaatgcacaagctttaaacacgcttgttaaacaacttagctccaattttggtgcaatttcaagtgttttaaatgatatcctttcacgtcttgacaaagttgaggctgaagtgcaaattgataggttgatcacaggcagacttcaaagtttgcagacatatgtgactcaacaattaattagagctgcagaaatcagagcttctgctaatcttgctgctactaaaatgtcagagtgtgtacttggacaatcaaaaagagttgatttttgtggaaagggctatcatcttatgtccttccctcagtcagcacctcatggtgtagtcttcttgcatgtgacttatgtccctgcacaagaaaagaacttcacaactgctcctgccatttgtcatgatggaaaagcacactttcctcgtgaaggtgtctttgtttcaaatggcacacactggtttgtaacacaaaggaatttttatgaaccacaaatcattactacagacaacacatttgtgtctggtaactgtgatgttgtaataggaattgtcaacaacacagtttatgatcctttgcaacctgaattagactcattcaaggaggagttagataaatattttaagaatcatacatcaccagatgttgatttaggtgacatctctggcattaatgcttcagttgtaaacattcaaaaagaaattgaccgcctcaatgaggttgccaagaatttaaatgaatctctcatcgatctccaagaacttggaaagtatgagcagtatataaaatggccatggtacatttggctaggttttatagctggcttgattgccatagtaatggtgacaattatgctttgctgtatgaccagttgctgtagttgtctcaagggctgttgttcttgtggatcctgctgcaaggccagaagcacaccaatcacactaagcaaggatcaactgagtggtataaataatattgcatttagtaactaaataaaaatagcacctaatcatgttcttacaatggtttactatctgctcatagacaacccatctatcattggattttcttaaaatctgaacttcatcgaaactcttatctataaaccatctcacttacactatttaagtagattcctagtttatagttatataaaacacaattgaatgccagtcgaccttaccatctgtaaaaatgaaaactggggcaaatatgtcacgaaggaatccttgcaaatttgaaattcgaggtcattgcttaaatggtaagaggtgtcattttagtcataattattttgaatggccaccccatgcactgcttgtaagacaaaactttatgttaaacagaatacttaagtctatggataaaagtatagataccttatcagaaataagtggagctgcagagttggacagaacagaagagtatgctcttggtgtagttggagtgctagagagttatataggatcaataaacaatataactaaacaatcagcatgtgttgccatgagcaaactcctcactgaactcaatagtgatgatatcaaaaagctgagggacaatgaagagctaaattcacccaagataagagtgtacaatactgtcatatcatatattgaaagcaacaggaaaaacaataaacaaactatccatctgttaaaaagattgccagcagacgtattgaagaaaaccatcaaaaacacattggatatccataagagcataaccatcaacaacccaaaagaatcaactgttagtgatacaaatgaccatgccaaaaataatgatactacctgacaaatatccttgtagtataacttccatactaataacaagtagatgtagagttactatgtataatcaaaagaacacactatatttcaatcaaaacaacccaaataaccatatgtactcaccgaatcaaacattcaatgaaatccattggacctctcaagaattgattgacacaattcaaaattttctacaacatctaggtattattgaggatatatatacaatatatatattagtgtcataacactcaattctaacactcaccacatcgttacattattaattcaaacaattcaagttgtgggacaaaatggatcccattattaatggaaattctgctaatgtttatctaaccgatagttatttaaaaggtgttatctctttctcagagtgtaatgctttaggaagttacatattcaatggtccttatctcaaaaatgattataccaacttaattagtagacaaaatccattaatagaacacatgaatctaaagaaactaaatataacacagtccttaatatctaagtatcataaaggtgaaataaaattagaagaacctacttattttcagtcattacttatgacatacaagagtatgacctcgtcagaacagattgctaccactaatttacttaaaaagataataagaagagctatagaaataagtgatgtcaaagtctatgctatattgaataaactagggcttaaagaaaaggacaagattaaatccaacaatggacaagatgaagacaactcagttattacgaccataatcaaagatgatatactttcagctgttaaagataatcaatctcatcttaaagcagacaaaaatcactctacaaaacaaaaagacacaatcaaaacaacactcttgaagaaattgatgtgttcaatgcaacatcctccatcatggttaatacattggtttaacttatacacaaaattaaacaacatattaacacagtatcgatcaaatgaggtaaaaaaccatgggtttacattgatagataatcaaactcttagtggatttcaatttattttgaaccaatatggttgtatagtttatcataaggaactcaaaagaattactgtgacaacctataatcaattcttgacatggaaagatattagccttagtagattaaatgtttgtttaattacatggattagtaactgcttgaacacattaaataaaagcttaggcttaagatgcggattcaataatgttatcttgacacaactattcctttatggagattgtatactaaagctatttcacaatgaggggttctacataataaaagaggtagagggatttattatgtctctaattttaaatataacagaagaagatcaattcagaaaacgattttataatagtatgctcaacaacatcacagatgctgctaataaagctcagaaaaatctgctatcaagagtatgtcatacattattagataagacagtgtccgataatataataaatggcagatggataattctattaagtaagttccttaaattaattaagcttgcaggtgacaataaccttaacaatctgagtgaactatattttttgttcagaatatttggacacccaatggtagatgaaagacaagccatggatgctgttaaaattaattgcaatgagaccaaattttacttgttaagcagtctgagtatgttaagaggtgcctttatatatagaattataaaagggtttgtaaataattacaacagatggcctactttaagaaatgctattgttttacccttaagatggttaacttactataaactaaacacttatccttctttgttggaacttacagaaagagatttgattgtgttatcaggactacgtttctatcgtgagtttcggttgcctaaaaaagtggatcttgaaatgattataaatgataaagctatatcacctcctaaaaatttgatatggactagtttccctagaaattacatgccatcacacatacaaaactatatagaacatgaaaaattaaaattttccgagagtgataaatcaagaagagtattagagtattatttaagagataacaaattcaatgaatgtgatttatacaactgtgtagttaatcaaagttatctcaacaaccctaatcatgtggtatcattgacaggcaaagaaagagaactcagtgtaggtagaatgtttgcaatgcaaccgggaatgttcagacaggttcaaatattggcagagaaaatgatagctgaaaacattttacaattctttcctgaaagtcttacaagatatggtgatctagaactacaaaaaatattagaattgaaagcaggaataagtaacaaatcaaatcgctacaatgataattacaacaattacattagtaagtgctctatcatcacagatctcagcaaattcaatcaagcatttcgatatgaaacgtcatgtatttgtagtgatgtgctggatgaactgcatggtgtacaatctctattttcctggttacatttaactattcctcatgtcacaataatatgcacatataggcatgcacccccctatataggagatcatattgtagatcttaacaatgtagatgaacaaagtggattatatagatatcacatgggtggcatcgaagggtggtgtcaaaaactgtggaccatagaagctatatcactattggatctaatatctctcaaagggaaattctcaattactgctttaattaatggtgacaatcaatcaatagatataagcaaaccaatcagactcatggaaggtcaaactcatgctcaagcagattatttgctagcattaaatagccttaaattactgtataaagagtatgcaggcataggccacaaattaaaaggaactgagacttatatatcacgagatatgcaatttatgagtaaaacaattcaacataacggtgtatattacccagctagtataaagaaagtcctaagagtgggaccgtggataaacactatacttgatgatttcaaagtgagtctagaatctataggtagtttgacacaagaattagaatatagaggtgaaagtctattatgcagtttaatatttagaaatgtatggttatataatcagattgctctacaattaaaaaatcatgcattatgtaacaataaactatatttggacatattaaaggttctgaaacacttaaaaaccttttttaatcttgataatattgatacagcattaacattgtatatgaatttacccatgttatttggtggtggtgatcccaacttgttatatcgaagtttctatagaagaactcctgacttcctcacagaggctatagttcactctgtgttcatacttagttattatacaaaccatgacttaaaagataaacttcaagatctgtcagatgatagattgaataagttcttaacatgcataatcacgtttgacaaaaaccctaatgctgaattcgtaacattgatgagagatcctcaagctttagggtctgagagacaagctaaaattactagcgaaatcaatagactggcagttacagaggttttgagtacagctccaaacaaaatattctccaaaagtgcacaacattatactactacagagatagatctaaatgatattatgcaaaatatagaacctacatatcctcatgggctaagagttgtttatgaaagtttacccttttataaagcagagaaaatagtaaatcttatatcaggtacaaaatctataactaacatactggaaaaaacttctgccatagacttaacagatattgatagagccactgagatgatgaggaaaaacataactttgcttataaggatacttccattggattgtaacagagataaaagagagatattgagtatggaaaacctaagtattactgaattaagcaaatatgttagggaaagatcttggtctttatccaatatagttggtgttacatcacccagtatcatgtatacaatggacatcaaatatactacaagcactatatctagtggcataattatagagaaatataatgttaacagtttaacacgtggtgagagaggacccactaaaccatgggttggttcatctacacaagagaaaaaaacaatgccagtttataatagacaagtcttaaccaaaaaacagagagatcaaatagatctattagcaaaattggattgggtgtatgcatctatagataacaaggatgaattcatggaagaactcagcataggaacccttgggttaacatatgaaaaggccaagaaattatttccacaatatttaagtgtcaattatttgcatcgccttacagtcagtagtagaccatgtgaattccctgcatcaataccagcttatagaacaacaaattatcactttgacactagccctattaatcgcatattaacagaaaagtatggtgatgaagatattgacatagtattccaaaactgtataagctttggccttagtttaatgtcagtagtagaacaatttactaatgtatgtcctaacagaattattctcatacctaagcttaatgagatacatttgatgaaacctcccatattcacaggtgatgttgatattcacaagttaaaacaagtgatacaaaaacagcatatgtttttaccagacaaaataagtttgactcaatatgtggaattattcttaagtaataaaacactcaaatctggatctcatgttaattctaatttaatattggcacataaaatatctgactattttcataatacttacattttaagtactaatttagctggacattggattctgattatacaacttatgaaagattctaaaggtatttttgaaaaagattggggagagggatatataactgatcatatgtttattaatttgaaagttttcttcaatgcttataagacctatctcttgtgttttcataaaggttatggcaaagcaaagctggagtgtgatatgaacacttcagatcttctatgtgtattggaattaatagacagtagttattggaagtctatgtctaaggtatttttagaacaaaaagttatcaaatacattcttagccaagatgcaagtttacatagagtaaaaggatgtcatagcttcaaattatggtttcttaaacgtcttaatgtagcagaattcacagtttgcccttgggttgttaacatagattatcatccaacacatatgaaagcaatattaacttatatagatcttgttagaatgggattgataaatatagatagaatacacattaaaaataaacacaaattcaatgatgaattttatacttctaatctcttctacattaattataacttctcagataatactcatctattaactaaacatataaggattgctaattctgaattagaaaataattacaacaaattatatcatcctacaccagaaaccctagagaatatactagccaatccgattaaaagtaatgacaaaaagacactgaatgactattgtataggtaaaaatgttgactcaataatgttaccattgttatctaataagaagcttattaaatcgtctgcaatgattagaaccaattacagcaaacaagatttgtataatttattccctatggttgtgattgatagaattatagatcattcaggcaatacagccaaatccaaccaactttacactactacttcccaccaaatatctttagtgcacaatagcacatcactttactgcatgcttccttggcatcatattaatagattcaattttgtatttagttctacaggttgtaaaattagtatagagtatattttaaaagatcttaaaattaaagatcccaattgtatagcattcataggtgaaggagcagggaatttattattgcgtacagtagtggaacttcatcctgacataagatatatttacagaagtctgaaagattgcaatgatcatagtttacctattgagtttttaaggctgtacaatggacatatcaacattgattatggtgaaaatttgaccattcctgctacagatgcaaccaacaacattcattggtcttatttacatataaagtttgctgaacctatcagtctttttgtctgtgatgccgaattgtctgtaacagtcaactggagtaaaattataatagaatggagcaagcatgtaagaaagtgcaagtactgttcctcagttaataaatgtatgttaatagtaaaatatcatgctcaagatgatattgatttcaaattagacaatataactatattaaaaacttatgtatgcttaggcagtaagttaaagggatcggaggtttacttagtccttacaataggtcctgcgaatatattcccagtatttaatgtagtacaaaatgctaaattgatactatcaagaaccaaaaatttcatcatgcctaagaaagctgataaagagtctattgatgcaaatattaaaagtttgataccctttctttgttaccctataacaaaaaaaggaattaatactgcattgtcaaaactaaagagtgttgttagtggagatatactatcatattctatagctggacgtaatgaagttttcagcaataaacttataaatcataagcatatgaacatcttaaaatggttcaatcatgttttaaatttcagatcaacagaactaaactataaccatttatatatggtagaatctacatatccttacctaagtgaattgttaaacagcttgacaaccaatgaacttaaaaaactgattaaaatcacaggtagtctgttatacaactttcataatgaataatgaataaagatcttataataaaaattcccatagctatacactaacactgtattcaattatagttattaaaaattaaaaatcgtacgattttttaaataacttttagtgaactaatcctaaagttatcattttaatcttggaggaataaatttaaaccctaatctaattggtttatatgtgtattaactaaattacgagatattagtttttgacactttttttctcgtgggtcggcatggcatctccacctcctcgcggtccgacctgggcatccgaaggaggacgcacgtccactcggatggctaagggagctgctaacaaagcccgaaaggaagctgagttggctgctgccaccgctgagcaataactagcataaccccttggggcctctaaacgggtcttgaggggttttttgctgaaaggaggaactatatacgcgtaagcttctcgacccattctcatgtttgacagcttatcatcgaatttctgccattcatccgcttattatcacttattcaggcgtagcaaccaggcgtttaagggcaccaataactgccttaaaaaaattacgccccgccctgccactcatcgcagtactgttgtaattcattaagcattctgccgacatggaagccatcacagacggcatgatgaacctgaatcgccagcggcatcagcaccttgtcgccttgcgtataatatttgcccatggtgaaaacgggggcgaagaagttgtccatattggccacgtttaaatcaaaactggtgaaactcacccagggattggctgagacgaaaaacatattctcaataaaccctttagggaaataggccaggttttcaccgtaacacgccacatcttgcgaatatatgtgtagaaactgccggaaatcgtcgtggtattcactccagagcgatgaaaacgtttcagtttgctcatggaaaacggtgtaacaagggtgaacactatcccatatcaccagctcaccgtctttcattgccatacggaattccggatgagcattcatcaggcgggcaagaatgtgaataaaggccggataaaacttgtgcttatttttctttacggtctttaaaaaggccgtaatatccagctgaacggtctggttataggtacattgagcaactgactgaaatgcctcaaaatgttctttacgatgccattgggatatatcaacggtggtatatccagtgatttttttctccattttagcttccttagctcctgaaaatctcgataactcaaaaaatacgcccggtagtgatcttatttcattatggtgaaagttggaacctcttacgtgccgatcaacgtctcattttcgccaaaagttggcccagggcttcccggtatcaacagggacaccaggatttatttattctgcgaagtgatcttccgtcacaggtatttattcgcgataagctcatggagcggcgtaaccgtcgcacaggaaggacagagaaagcgcggatctgggaagtgacggacagaacggtcaggacctggattggggaggcggttgccgccgctgctgctgacggtgtgacgttctctgttccggtcacaccacatacgttccgccattcctatgcgatgcacatgctgtatgccggtataccgctgaaagttctgcaaagcctgatgggacataagtccatcagttcaacggaagtctacacgaaggtttttgcgctggatgtggctgcccggcaccgggtgcagtttgcgatgccggagtctgatgcggttgcgatgctgaaacaattatcctgagaataaatgccttggcctttatatggaaatgtggaactgagtggatatgctgtttttgtctgttaaacagagaagctggctgttatccactgagaagcgaacgaaacagtcgggaaaatctcccattatcgtagagatccgcattattaatctcaggagcctgtgtagcgtttataggaagtagtgttctgtcatgatgcctgcaagcggtaacgaaaacgatttgaatatgccttcaggaacaatagaaatcttcgtgcggtgttacgttgaagtggagcggattatgtcagcaatggacagaacaacctaatgaacacagaaccatgatgtggtctgtccttttacagccagtaggctcgccgcagtcgagcgacggcgaagccctcgagtgagcgaggaagcaccagggaacagcacttatatattctgcttacacacgatgcctgaaaaaacttcccttggggttatccacttatccacggggatatttttataattattttttttatagtttttagatcttcttttttagagcgccttgtaggcctttatccatgctggttctagagaaggtgttgtgacaaattgccctttcagtgtgacaaatcaccctcaaatgacagtcctgtctgtgacaaattgcccttaaccctgtgacaaattgccctcagaagaagctgttttttcacaaagttatccctgcttattgactcttttttatttagtgtgacaatctaaaaacttgtcacacttcacatggatctgtcatggcggaaacagcggttatcaatcacaagaaacgtaaaaatagcccgcgaatcgtccagtcaaacgacctcactgaggcggcatatagtctctcccgggatcaaaaacgtatgctgtatctgttcgttgaccagatcagaaaatctgatggcaccctacaggaacatgacggtatctgcgagatccatgttgctaaatatgctgaaatattcggattgacctctgcggaagccagtaaggatatacggcaggcattgaagagtttcgcggggaaggaagtggttttttatcgccctgaagaggatgccggcgatgaaaaaggctatgaatcttttccttggtttatcaaacgtgcgcacagtccatccagagggctttacagtgtacatatcaacccatatctcattcccttctttatcgggttacagaaccggtttacgcagtttcggcttagtgaaacaaaagaaatcaccaatccgtatgccatgcgtttatacgaatccctgtgtcagtatcgtaagccggatggctcaggcatcgtctctctgaaaatcgactggatcatagagcgttaccagctgcctcaaagttaccagcgtatgcctgacttccgccgccgcttcctgcaggtctgtgttaatgagatcaacagcagaactccaatgcgcctctcatacattgagaaaaagaaaggccgccagacgactcatatcgtattttccttccgcgatatcacttccatgacgacaggatagtctgagggttatctgtcacagatttgagggtggttcgtcacatttgttctgacctactgagggtaatttgtcacagttttgctgtttccttcagcctgcatggattttctcatactttttgaactgtaatttttaaggaagccaaatttgagggcagtttgtcacagttgatttccttctctttcccttcgtcatgtgacctgatatcgggggttagttcgtcatcattgatgagggttgattatcacagtttattactctgaattggctatccgcgtgtgtacctctacctggagtttttcccacggtggatatttcttcttgcgctgagcgtaagagctatctgacagaacagttcttctttgcttcctcgccagttcgctcgctatgctcggttacacggctgcggcgagcgctagtgataataagtgactgaggtatgtgctcttcttatctccttttgtagtgttgctcttattttaaacaactttgcggttttttgatgactttgcgattttgttgttgctttgcagtaaattgcaagatttaataaaaaaacgcaaagcaatgattaaaggatgttcagaatgaaactcatggaaacacttaaccagtgcataaacgctggtcatgaaatgacgaaggctatcgccattgcacagtttaatgatgacagcccggaagcgaggaaaataacccggcgctggagaataggtgaagcagcggatttagttggggtttcttctcaggctatcagagatgccgagaaagcagggcgactaccgcacccggatatggaaattcgaggacgggttgagcaacgtgttggttatacaattgaacaaattaatcatatgcgtgatgtgtttggtacgcgattgcgacgtgctgaagacgtatttccaccggtgatcggggttgctgcccataaaggtggcgtttacaaaacctcagtttctgttcatcttgctcaggatctggctctgaaggggctacgtgttttgctcgtggaaggtaacgacccccagggaacagcctcaatgtatcacggatgggtaccagatcttcatattcatgcagaagacactctcctgcctttctatcttggggaaaaggacgatgtcacttatgcaataaagcccacttgctggccggggcttgacattattccttcctgtctggctctgcaccgtattgaaactgagttaatgggcaaatttgatgaaggtaaactgcccaccgatccacacctgatgctccgactggccattgaaactgttgctcatgactatgatgtcatagttattgacagcgcgcctaacctgggtatcggcacgattaatgtcgtatgtgctgctgatgtgctgattgttcccacgcctgctgagttgtttgactacacctccgcactgcagtttttcgatatgcttcgtgatctgctcaagaacgttgatcttaaagggttcgagcctgatgtacgtattttgcttaccaaatacagcaatagtaatggctctcagtccccgtggatggaggagcaaattcgggatgcctggggaagcatggttctaaaaaatgttgtacgtgaaacggatgaagttggtaaaggtcagatccggatgagaactgtttttgaacaggccattgatcaacgctcttcaactggtgcctggagaaatgctctttctatttgggaacctgtctgcaatgaaattttcgatcgtctgattaaaccacgctgggagattagataatgaagcgtgcgcctgttattccaaaacatacgctcaatactcaaccggttgaagatacttcgttatcgacaccagctgccccgatggtggattcgttaattgcgcgcgtaggagtaatggctcgcggtaatgccattactttgcctgtatgtggtcgggatgtgaagtttactcttgaagtgctccggggtgatagtgttgagaagacctctcgggtatggtcaggtaatgaacgtgaccaggagctgcttactgaggacgcactggatgatctcatcccttcttttctactgactggtcaacagacaccggcgttcggtcgaagagtatctggtgtcatagaaattgccgatgggagtcgccgtcgtaaagctgctgcacttaccgaaagtgattatcgtgttctggttggcgagctggatgatgagcagatggctgcattatccagattgggtaacgattatcgcccaacaagtgcttatgaacgtggtcagcgttatgcaagccgattgcagaatgaatttgctggaaatatttctgcgctggctgatgcggaaaatatttcacgtaagattattacccgctgtatcaacaccgccaaattgcctaaatcagttgttgctcttttttctcaccccggtgaactatctgcccggtcaggtgatgcacttcaaaaagcctttacagataaagaggaattacttaagcagcaggcatctaaccttcatgagcagaaaaaagctggggtgatatttgaagctgaagaagttatcactcttttaacttctgtgcttaaaacgtcatctgcatcaagaactagtttaagctcacgacatcagtttgctcctggagcgacagtattgtataagggcgataaaatggtgcttaacctggacaggtctcgtgttccaactgagtgtatagagaaaattgaggccattcttaaggaacttgaaaagccagcaccctgatgcgaccacgttttagtctacgtttatctgtctttacttaatgtcctttgttacaggccagaaagcataactggcctgaatattctctctgggcccactgttccacttgtatcgtcggtctgataatcagactgggaccacggtcccactcgtatcgtcggtctgattattagtctgggaccacggtcccactcgtatcgtcggtctgattattagtctgggaccacggtcccactcgtatcgtcggtctgataatcagactgggaccacggtcccactcgtatcgtcggtctgattattagtctgggaccatggtcccactcgtatcgtcggtctgattattagtctgggaccacggtcccactcgtatcgtcggtctgattattagtctggaaccacggtcccactcgtatcgtcggtctgattattagtctgggaccacggtcccactcgtatcgtcggtctgattattagtctgggaccacgatcccactcgtgttgtcggtctgattatcggtctgggaccacggtcccacttgtattgtcgatcagactatcagcgtgagactacgattccatcaatgcctgtcaagggcaagtattgacatgtcgtcgtaacctgtagaacggagtaacctcggtgtgcggttgtatgcctgctgtggattgctgctgtgtcctgcttatccacaacattttgcgcacggttatgtggacaaaatacctggttacccaggccgtgccggcacgttaaccgggctgcatccgatgcaagtgtgtcgctgtcgagttt

SEQ ID NO: 55 - DNA, 23434 bp, Artificial Sequence
  Description of Artificial Sequence: Synthetic polynucleotide
aaacggatccttcgaaacgaaattaatacgactcactatagggaagtttttcgcgtctgatgaggccgttaggccgaaactcctctccggagtcacgcgaaaaaatgcgtacaacaaacttgcataaaccaaaaaaatggggcaaataagaatttgataagtaccacttaaatttaactcccttgcttagcgatggtgagcgagctgattaaggagaacatgcacatgaagctgtacatggagggcaccgtgaacaaccaccacttcaagtgcacatccgagggcgaaggcaagccctacgagggcacccagaccatgagaatcaaggcggtcgagggcggccctctccccttcgccttcgacatcctggctaccagcttcatgtacggcagcaaaaccttcatcaaccacacccagggcatccccgacttctttaagcagtccttccccgagggcttcacatgggagagagtcaccacatacgaagacgggggcgtgctgaccgctacccaggacaccagcctccaggacggctgcctcatctacaacgtcaagatcagaggggtgaacttcccatccaacggccctgtgatgcagaagaaaacactcggctgggaggcctccaccgagaccctgtaccccgctgacggcggcctggaaggcagagccgacatggccctgaagctcgtgggcgggggccacctgatctgcaacttgaagaccacatacagatccaagaaacccgctaagaacctcaagatgcccggcgtctactatgtggacagaagactggaaagaatcaaggaggccgacaaagagacctacgtcgagcagcacgaggtggctgtggccagatactgcgacctccctagcaaactggggcacagatgagtattcaattatagttattaaaaacttaacagaagacaaaaatggggcaaataagaatttgataagtaccacttaaatttaactcccttgcttagcgatgggttcgaattcgctatcgatgataaaagtacgtctacaaaatctatttgataatgatgaagtagcgctactaaaaataacgtgttatacggataaactaatacatctaacgaatgcgctagcgaaagcggtaatacatacgataaaactaaatggtatagtatttgtacatgtaataacgtcgtcggatatatgtccgaataataatatagtagtaaaatcgaattttacgacgatgccggtactacaaaatggtggttatatatgggaaatgatggaactaacgcattgttcgcaaccgaatggtctactagatgataattgtgaaataaaattttcgaaaaaactatcggattcgacgatgacgaattatatgaatcaactatcggaactactaggttttgatctaaatccgtaaattataattaatatcaactagcaaatcaatgtcactaacaccattagttaatataaaacttaacagaagacaaaaatggggcaaataaatcaattcagccaacccaaccatggatacgacgcataatgataatacgccgcaacgtctaatgataacggatatgcgtccgctatcgctagaaacgataataacgtcgctaacgcgtgatataataacgcataaatttatatatctaataaatcatgaatgtatagtacgtaaactagatgaacgtcaagcgacgtttacgtttctagtaaattatgaaatgaaactactacataaagtaggttcgacgaaatataaaaaatatacggaatataatacgaaatatggtacgtttccgatgccgatatttataaatcatgatggttttctagaatgtataggtataaaaccgacgaaacatacgccgataatatataaatatgatctaaatccgtaaatttcaacacaatattcacacaatctaaaacaacaactctatgcataactatactccatagtccagatggagcctgaaaattatagtaatttaaaattaaggagagatataagatagaagatggggcaaatacaaagatggctcttagcaaagtcaagttgaatgatacactcaacaaagatcaacttctgtcatccagcaaatacaccatccaacggagcacaggagatagtattgatactcctaattatgatgtgcagaaacacatcaataagttatgtggcatgttattaatcacagaagatgctaatcataaattcactgggttaataggtatgttatatgcgatgtctaggttaggaagagaagacaccataaaaatactcagagatgcgggatatcatgtaaaagcaaatggagtagatgtaacaacacatcgtcaagacattaatggaaaagaaatgaaatttgaagtgttaacattggcaagcttaacaactgaaattcaaatcaacattgagatagaatctagaaaatcctacaaaaaaatgctaaaagaaatgggagaggtagctccagaatacaggcatgactctcctgattgtgggatgataatattatgtatagcagcattagtaataactaaattagcagcaggggacagatctggtcttacagccgtgattaggagagctaataatgtcctaaaaaatgaaatgaaacgttacaaaggcttactacccaaggacatagccaacagcttctatgaagtgtttgaaaaacatccccactttatagatgtttttgttcattttggtatagcacaatcttctaccagaggtggcagtagagttgaagggatttttgcaggattgtttatgaatgcctatggtgcagggcaagtgatgttacggtggggagtcttagcaaaatcagttaaaaatattatgttaggacatgctagtgtgcaagcagaaatggaacaagttgttgaggtttatgaatatgcccaaaaattgggtggtgaagcaggattctaccatatattgaacaacccaaaagcatcattattatctttgactcaatttcctcacttctccagtgtagtattaggcaatgctgctggcctaggcataatgggagagtacagaggtacaccgaggaatcaagatctatatgatgcagcaaaggcatatgctgaacaactcaaagaaaatggtgtgattaactacagtgtactagacttgacagcagaagaactagaggctatcaaacatcagcttaatccaaaagataatgatgtagagctttgagttaataaaaaatggggcaaataaatcatcatggaaaagtttgctcctgaattccatggagaagatgcaaacaacagggctactaaattcctagaatcaataaagggcaaattcacatcacccaaagatcccaagaaaaaagatagtatcatatctgtcaactcaatagatatagaagtaaccaaagaaagccctataacatcaaattcaactattatcaacccaacaaatgagacagatgatactgcagggaacaagcccaattatcaaagaaaacctctagtaagtttcaaagaagaccctacaccaagtgataatcccttttctaaactatacaaagaaaccatagaaacatttgataacaatgaagaagaatccagctattcatacgaagaaataaatgatcagacaaacgataatataacagcaagattagataggattgatgaaaaattaagtgaaatactaggaatgcttcacacattagtagtggcaagtgcaggacctacatctgctcgggatggtataagagatgccatgattggtttaagagaagaaatgatagaaaaaatcagaactgaagcattaatgaccaatgacagattagaagctatggcaagactcaggaatgaggaaagtgaaaagatggcaaaagacacatcagatgaagtgtctctcaatccaacatcagagaaattgaacaacctattggaagggaatgatagtgacaatgatctatcacttgaagatttctgattagttaccactcttcacatcaacacacaataccaacagaagaccaacaaactaaccaacccaatcatccaaccaaacatccatccgccaatcagccaaacagccaacaaaacaaccagccaatccaaaactaaccacccggaaaaaatctataatatagttacaaaaaaaggaaagggtggggcaaatatggaaacatacgtgaacaagcttcacgaaggctccacatacacagctgctgttcaatacaatgtcttagaaaaagacgatgaccctgcatcacttacaatatgggtgcccatgttccaatcatctatgccagcagatttacttataaaagaactagctaatgtcaacatactagtgaaacaaatatccacacccaagggaccttcactaagagtcatgataaactcaagaagtgcagtgctagcacaaatgcccagcaaatttaccatatgcgctaatgtgtccttggatgaaagaagcaaactagcatatgatgtaaccacaccctgtgaaatcaaggcatgtagtctaacatgcctaaaatcaaaaaatatgttgactacagttaaagatctcactatgaagacactcaaccctacacatgatattattgctttatgtgaatttgaaaacatagtaacatcaaaaaaagtcataataccaacatacctaagatccatcagtgtcagaaataaagatctgaacacacttgaaaatataacaaccactgaattcaaaaatgctatcacaaatgcaaaaatcatcccttactcaggattactattagtcatcacagtgactgacaacaaaggagcattcaaatacataaagccacaaagtcaattcatagtagatcttggagcttacctagaaaaagaaagtatatattatgttaccacaaattggaagcacacagctacacgatttgcaatcaaacccatggaagattaacctttttcctctacatcagtgtgttaattcatacaaactttctacctacattcttcacttcaccatcacaatcacaaacactctgtggttcaaccaatcaaacaaaacttatctgaagtcccagatcatcccaagtcattgtttatcagatctagtactcaaataagttaataaaaaatatacacatggacgtccatggggcaaatgcaaacatgtttgtttttcttgttttattgccactagtctctagtcagtgtgttaatcttacaaccagaactcaattaccccctgcatacactaattctttcacacgtggtgtttattaccctgacaaagttttcagatcctcagttttacattcaactcaggacttgttcttacctttcttttccaatgttacttggttccatgctatacatgtctctgggaccaatggtactaagaggtttgataaccctgtcctaccatttaatgatggtgtttattttgcttccactgagaagtctaacataataagaggctggatttttggtactactttagattcgaagacccagtccctacttattgttaataacgctactaatgttgttattaaagtctgtgaatttcaattttgtaatgatccatttttgggtgtttattaccacaaaaacaacaaaagttggatggaaagtgagttcagagtttattctagtgcgaataattgcacttttgaatatgtctctcagccttttcttatggaccttgaaggaaaacagggtaatttcaaaaatcttagggaatttgtgtttaagaatattgatggttattttaaaatatattctaagcacacgcctattaatttagtgcgtgatctccctcagggtttttcggctttagaaccattggtagatttgccaataggtattaacatcactaggtttcaaactttacttgctttacatagaagttatttgactcctggtgattcttcttcaggttggacagctggtgctgcagcttattatgtgggttatcttcaacctaggacttttctattaaaatataatgaaaatggaaccattacagatgctgtagactgtgcacttgaccctctctcagaaacaaagtgtacgttgaaatccttcactgtagaaaaaggaatctatcaaacttctaactttagagtccaaccaacagaatctattgttagatttcctaatattacaaacttgtgcccttttggtgaagtttttaacgccaccagatttgcatctgtttatgcttggaacaggaagagaatcagcaactgtgttgctgattattctgtcctatataattccgcatcattttccacttttaagtgttatggagtgtctcctactaaattaaatgatctctgctttactaatgtctatgcagattcatttgtaattagaggtgatgaagtcagacaaatcgctccagggcaaactggaaagattgctgattataattataaattaccagatgattttacaggctgcgttatagcttggaattctaacaatcttgattctaaggttggtggtaattataattacctgtatagattgtttaggaagtctaatctcaaaccttttgagagagatatttcaactgaaatctatcaggccggtagcacaccttgtaatggtgttgaaggttttaattgttactttcctttacaatcatatggtttccaacccactaatggtgttggttaccaaccatacagagtagtagtactttcttttgaacttctacatgcaccagcaactgtttgtggacctaaaaagtctactaatttggttaaaaacaaatgtgtcaatttcaacttcaatggtttaacaggcacaggtgttcttactgagtctaacaaaaagtttctgcctttccaacaatttggcagagacattgctgacactactgatgctgtccgtgatccacagacacttgagattcttgacattacaccatgttcttttggtggtgtcagtgttataacaccaggaacaaatacttctaaccaggttgctgttctttatcaggatgttaactgcacagaagtccctgttgctattcatgcagatcaacttactcctacttggcgtgtttattctacaggttctaatgtttttcaaacacgtgcaggctgtttaataggggctgaacatgtcaacaactcatatgagtgtgacatacccattggtgcaggtatatgcgctagttatcagactcagactaattctcctcggcgggcacgtagtgtagctagtcaatccatcattgcctacactatgtcacttggtgcagaaaattcagttgcttactctaataactctattgccatacccacaaattttactattagtgttaccacagaaattctaccagtgtctatgaccaagacatcagtagattgtacaatgtacatttgtggtgattcaactgaatgcagcaatcttttgttgcaatatggcagtttttgtacacaattaaaccgtgctttaactggaatagctgttgaacaagacaaaaacacccaagaagtttttgcacaagtcaaacaaatttacaaaacaccaccaattaaagattttggtggttttaatttttcacaaatattaccagatccatcaaaaccaagcaagaggtcatttattgaagatctacttttcaacaaagtgacacttgcagatgctggcttcatcaaacaatatggtgattgccttggtgatattgctgctagagacctcatttgtgcacaaaagtttaacggccttactgttttgccacctttgctcacagatgaaatgattgctcaatacacttctgcactgttagcgggtacaatcacttctggttggacctttggtgcaggtgctgcattacaaataccatttgctatgcaaatggcttataggtttaatggtattggagttacacagaatgttctctatgagaaccaaaaattgattgccaaccaatttaatagtgctattggcaaaattcaagactcactttcttccacagcaagtgcacttggaaaacttcaagatgtggtcaaccaaaatgcacaagctttaaacacgcttgttaaacaacttagctccaattttggtgcaatttcaagtgttttaaatgatatcctttcacgtcttgacaaagttgaggctgaagtgcaaattgataggttgatcacaggcagacttcaaagtttgcagacatatgtgactcaacaattaattagagctgcagaaatcagagcttctgctaatcttgctgctactaaaatgtcagagtgtgtacttggacaatcaaaaagagttgatttttgtggaaagggctatcatcttatgtccttccctcagtcagcacctcatggtgtagtcttcttgcatgtgacttatgtccctgcacaagaaaagaacttcacaactgctcctgccatttgtcatgatggaaaagcacactttcctcgtgaaggtgtctttgtttcaaatggcacacactggtttgtaacacaaaggaatttttatgaaccacaaatcattactacagacaacacatttgtgtctggtaactgtgatgttgtaataggaattgtcaacaacacagtttatgatcctttgcaacctgaattagactcattcaaggaggagttagataaatattttaagaatcatacatcaccagatgttgatttaggtgacatctctggcattaatgcttcagttgtaaacattcaaaaagaaattgaccgcctcaatgaggttgccaagaatttaaatgaatctctcatcgatctccaagaacttggaaagtatgagcagtatataaaatggccatggtacatttggctaggttttatagctggcttgattgccatagtaatggtgacaattatgctttgctgtatgaccagttgctgtagttgtctcaagggctgttgttcttgtggatcctgctgcaaatttgatgaagacgacaaggccagaagcacaccaatcacactaagcaaggatcaactgagtggtataaataatattgcatttagtaactaaataaaaatagcacctaatcatgttcttacaatggtttactatctgctcatagacaacccatctatcattggattttcttaaaatctgaacttcatcgaaactcttatctataaaccatctcacttacactatttaagtagattcctagtttatagttatataaaacacaattgaatgccagtcgaccttaccatctgtaaaaatgaaaactggggcaaatatgtcacgaaggaatccttgcaaatttgaaattcgaggtcattgcttaaatggtaagaggtgtcattttagtcataattattttgaatggccaccccatgcactgcttgtaagacaaaactttatgttaaacagaatacttaagtctatggataaaagtatagataccttatcagaaataagtggagctgcagagttggacagaacagaagagtatgctcttggtgtagttggagtgctagagagttatataggatcaataaacaatataactaaacaatcagcatgtgttgccatgagcaaactcctcactgaactcaatagtgatgatatcaaaaagctgagggacaatgaagagctaaattcacccaagataagagtgtacaatactgtcatatcatatattgaaagcaacaggaaaaacaataaacaaactatccatctgttaaaaagattgccagcagacgtattgaagaaaaccatcaaaaacacattggatatccataagagcataaccatcaacaacccaaaagaatcaactgttagtgatacaaatgaccatgccaaaaataatgatactacctgacaaatatccttgtagtataacttccatactaataacaagtagatgtagagttactatgtataatcaaaagaacacactatatttcaatcaaaacaacccaaataaccatatgtactcaccgaatcaaacattcaatgaaatccattggacctctcaagaattgattgacacaattcaaaattttctacaacatctaggtattattgaggatatatatacaatatatatattagtgtcataacactcaattctaacactcaccacatcgttacattattaattcaaacaattcaagttgtgggacaaaatggatcccattattaatggaaattctgctaatgtttatctaaccgatagttatttaaaaggtgttatctctttctcagagtgtaatgctttaggaagttacatattcaatggtccttatctcaaaaatgattataccaacttaattagtagacaaaatccattaatagaacacatgaatctaaagaaactaaatataacacagtccttaatatctaagtatcataaaggtgaaataaaattagaagaacctacttattttcagtcattacttatgacatacaagagtatgacctcgtcagaacagattgctaccactaatttacttaaaaagataataagaagagctatagaaataagtgatgtcaaagtctatgctatattgaataaactagggcttaaagaaaaggacaagattaaatccaacaatggacaagatgaagacaactcagttattacgaccataatcaaagatgatatactttcagctgttaaagataatcaatctcatcttaaagcagacaaaaatcactctacaaaacaaaaagacacaatcaaaacaacactcttgaagaaattgatgtgttcaatgcaacatcctccatcatggttaatacattggtttaacttatacacaaaattaaacaacatattaacacagtatcgatcaaatgaggtaaaaaaccatgggtttacattgatagataatcaaactcttagtggatttcaatttattttgaaccaatatggttgtatagtttatcataaggaactcaaaagaattactgtgacaacctataatcaattcttgacatggaaagatattagccttagtagattaaatgtttgtttaattacatggattagtaactgcttgaacacattaaataaaagcttaggcttaagatgcggattcaataatgttatcttgacacaactattcctttatggagattgtatactaaagctatttcacaatgaggggttctacataataaaagaggtagagggatttattatgtctctaattttaaatataacagaagaagatcaattcagaaaacgattttataatagtatgctcaacaacatcacagatgctgctaataaagctcagaaaaatctgctatcaagagtatgtcatacattattagataagacagtgtccgataatataataaatggcagatggataattctattaagtaagttccttaaattaattaagcttgcaggtgacaataaccttaacaatctgagtgaactatattttttgttcagaatatttggacacccaatggtagatgaaagacaagccatggatgctgttaaaattaattgcaatgagaccaaattttacttgttaagcagtctgagtatgttaagaggtgcctttatatatagaattataaaagggtttgtaaataattacaacagatggcctactttaagaaatgctattgttttacccttaagatggttaacttactataaactaaacacttatccttctttgttggaacttacagaaagagatttgattgtgttatcaggactacgtttctatcgtgagtttcggttgcctaaaaaagtggatcttgaaatgattataaatgataaagctatatcacctcctaaaaatttgatatggactagtttccctagaaattacatgccatcacacatacaaaactatatagaacatgaaaaattaaaattttccgagagtgataaatcaagaagagtattagagtattatttaagagataacaaattcaatgaatgtgatttatacaactgtgtagttaatcaaagttatctcaacaaccctaatcatgtggtatcattgacaggcaaagaaagagaactcagtgtaggtagaatgtttgcaatgcaaccgggaatgttcagacaggttcaaatattggcagagaaaatgatagctgaaaacattttacaattctttcctgaaagtcttacaagatatggtgatctagaactacaaaaaatattagaattgaaagcaggaataagtaacaaatcaaatcgctacaatgataattacaacaattacattagtaagtgctctatcatcacagatctcagcaaattcaatcaagcatttcgatatgaaacgtcatgtatttgtagtgatgtgctggatgaactgcatggtgtacaatctctattttcctggttacatttaactattcctcatgtcacaataatatgcacatataggcatgcacccccctatataggagatcatattgtagatcttaacaatgtagatgaacaaagtggattatatagatatcacatgggtggcatcgaagggtggtgtcaaaaactgtggaccatagaagctatatcactattggatctaatatctctcaaagggaaattctcaattactgctttaattaatggtgacaatcaatcaatagatataagcaaaccaatcagactcatggaaggtcaaactcatgctcaagcagattatttgctagcattaaatagccttaaattactgtataaagagtatgcaggcataggccacaaattaaaaggaactgagacttatatatcacgagatatgcaatttatgagtaaaacaattcaacataacggtgtatattacccagctagtataaagaaagtcctaagagtgggaccgtggataaacactatacttgatgatttcaaagtgagtctagaatctataggtagtttgacacaagaattagaatatagaggtgaaagtctattatgcagtttaatatttagaaatgtatggttatataatcagattgctctacaattaaaaaatcatgcattatgtaacaataaactatatttggacatattaaaggttctgaaacacttaaaaaccttttttaatcttgataatattgatacagcattaacattgtatatgaatttacccatgttatttggtggtggtgatcccaacttgttatatcgaagtttctatagaagaactcctgacttcctcacagaggctatagttcactctgtgttcatacttagttattatacaaaccatgacttaaaagataaacttcaagatctgtcagatgatagattgaataagttcttaacatgcataatcacgtttgacaaaaaccctaatgctgaattcgtaacattgatgagagatcctcaagctttagggtctgagagacaagctaaaattactagcgaaatcaatagactggcagttacagaggttttgagtacagctccaaacaaaatattctccaaaagtgcacaacattatactactacagagatagatctaaatgatattatgcaaaatatagaacctacatatcctcatgggctaagagttgtttatgaaagtttacccttttataaagcagagaaaatagtaaatcttatatcaggtacaaaatctataactaacatactggaaaaaacttctgccatagacttaacagatattgatagagccactgagatgatgaggaaaaacataactttgcttataaggatacttccattggattgtaacagagataaaagagagatattgagtatggaaaacctaagtattactgaattaagcaaatatgttagggaaagatcttggtctttatccaatatagttggtgttacatcacccagtatcatgtatacaatggacatcaaatatactacaagcactatatctagtggcataattatagagaaatataatgttaacagtttaacacgtggtgagagaggacccactaaaccatgggttggttcatctacacaagagaaaaaaacaatgccagtttataatagacaagtcttaaccaaaaaacagagagatcaaatagatctattagcaaaattggattgggtgtatgcatctatagataacaaggatgaattcatggaagaactcagcataggaacccttgggttaacatatgaaaaggccaagaaattatttccacaatatttaagtgtcaattatttgcatcgccttacagtcagtagtagaccatgtgaattccctgcatcaataccagcttatagaacaacaaattatcactttgacactagccctattaatcgcatattaacagaaaagtatggtgatgaagatattgacatagtattccaaaactgtataagctttggccttagtttaatgtcagtagtagaacaatttactaatgtatgtcctaacagaattattctcatacctaagcttaatgagatacatttgatgaaacctcccatattcacaggtgatgttgatattcacaagttaaaacaagtgatacaaaaacagcatatgtttttaccagacaaaataagtttgactcaatatgtggaattattcttaagtaataaaacactcaaatctggatctcatgttaattctaatttaatattggcacataaaatatctgactattttcataatacttacattttaagtactaatttagctggacattggattctgattatacaacttatgaaagattctaaaggtatttttgaaaaagattggggagagggatatataactgatcatatgtttattaatttgaaagttttcttcaatgcttataagacctatctcttgtgttttcataaaggttatggcaaagcaaagctggagtgtgatatgaacacttcagatcttctatgtgtattggaattaatagacagtagttattggaagtctatgtctaaggtatttttagaacaaaaagttatcaaatacattcttagccaagatgcaagtttacatagagtaaaaggatgtcatagcttcaaattatggtttcttaaacgtcttaatgtagcagaattcacagtttgcccttgggttgttaacatagattatcatccaacacatatgaaagcaatattaacttatatagatcttgttagaatgggattgataaatatagatagaatacacattaaaaataaacacaaattcaatgatgaattttatacttctaatctcttctacattaattataacttctcagataatactcatctattaactaaacatataaggattgctaattctgaattagaaaataattacaacaaattatatcatcctacaccagaaaccctagagaatatactagccaatccgattaaaagtaatgacaaaaagacactgaatgactattgtataggtaaaaatgttgactcaataatgttaccattgttatctaataagaagcttattaaatcgtctgcaatgattagaaccaattacagcaaacaagatttgtataatttattccctatggttgtgattgatagaattatagatcattcaggcaatacagccaaatccaaccaactttacactactacttcccaccaaatatctttagtgcacaatagcacatcactttactgcatgcttccttggcatcatattaatagattcaattttgtatttagttctacaggttgtaaaattagtatagagtatattttaaaagatcttaaaattaaagatcccaattgtatagcattcataggtgaaggagcagggaatttattattgcgtacagtagtggaacttcatcctgacataagatatatttacagaagtctgaaagattgcaatgatcatagtttacctattgagtttttaaggctgtacaatggacatatcaacattgattatggtgaaaatttgaccattcctgctacagatgcaaccaacaacattcattggtcttatttacatataaagtttgctgaacctatcagtctttttgtctgtgatgccgaattgtctgtaacagtcaactggagtaaaattataatagaatggagcaagcatgtaagaaagtgcaagtactgttcctcagttaataaatgtatgttaatagtaaaatatcatgctcaagatgatattgatttcaaattagacaatataactatattaaaaacttatgtatgcttaggcagtaagttaaagggatcggaggtttacttagtccttacaataggtcctgcgaatatattcccagtatttaatgtagtacaaaatgctaaattgatactatcaagaaccaaaaatttcatcatgcctaagaaagctgataaagagtctattgatgcaaatattaaaagtttgataccctttctttgttaccctataacaaaaaaaggaattaatactgcattgtcaaaactaaagagtgttgttagtggagatatactatcatattctatagctggacgtaatgaagttttcagcaataaacttataaatcataagcatatgaacatcttaaaatggttcaatcatgttttaaatttcagatcaacagaactaaactataaccatttatatatggtagaatctacatatccttacctaagtgaattgttaaacagcttgacaaccaatgaacttaaaaaactgattaaaatcacaggtagtctgttatacaactttcataatgaataatgaataaagatcttataataaaaattcccatagctatacactaacactgtattcaattatagttattaaaaattaaaaatcgtacgattttttaaataacttttagtgaactaatcctaaagttatcattttaatcttggaggaataaatttaaaccctaatctaattggtttatatgtgtattaactaaattacgagatattagtttttgacactttttttctcgtgggtcggcatggcatctccacctcctcgcggtccgacctgggcatccgaaggaggacgcacgtccactcggatggctaagggagctgctaacaaagcccgaaaggaagctgagttggctgctgccaccgctgagcaataactagcataaccccttggggcctctaaacgggtcttgaggggttttttgctgaaaggaggaactatatacgcgtaagcttctcgacccattctcatgtttgacagcttatcatcgaatttctgccattcatccgcttattatcacttattcaggcgtagcaaccaggcgtttaagggcaccaataactgccttaaaaaaattacgccccgccctgccactcatcgcagtactgttgtaattcattaagcattctgccgacatggaagccatcacagacggcatgatgaacctgaatcgccagcggcatcagcaccttgtcgccttgcgtataatatttgcccatggtgaaaacgggggcgaagaagttgtccatattggccacgtttaaatcaaaactggtgaaactcacccagggattggctgagacgaaaaacatattctcaataaaccctttagggaaataggccaggttttcaccgtaacacgccacatcttgcgaatatatgtgtagaaactgccggaaatcgtcgtggtattcactccagagcgatgaaaacgtttcagtttgctcatggaaaacggtgtaacaagggtgaacactatcccatatcaccagctcaccgtctttcattgccatacggaattccggatgagcattcatcaggcgggcaagaatgtgaataaaggccggataaaacttgtgcttatttttctttacggtctttaaaaaggccgtaatatccagctgaacggtctggttataggtacattgagcaactgactgaaatgcctcaaaatgttctttacgatgccattgggatatatcaacggtggtatatccagtgatttttttctccattttagcttccttagctcctgaaaatctcgataactcaaaaaatacgcccggtagtgatcttatttcattatggtgaaagttggaacctcttacgtgccgatcaacgtctcattttcgccaaaagttggcccagggcttcccggtatcaacagggacaccaggatttatttattctgcgaagtgatcttccgtcacaggtatttattcgcgataagctcatggagcggcgtaaccgtcgcacaggaaggacagagaaagcgcggatctgggaagtgacggacagaacggtcaggacctggattggggaggcggttgccgccgctgctgctgacggtgtgacgttctctgttccggtcacaccacatacgttccgccattcctatgcgatgcacatgctgtatgccggtataccgctgaaagttctgcaaagcctgatgggacataagtccatcagttcaacggaagtctacacgaaggtttttgcgctggatgtggctgcccggcaccgggtgcagtttgcgatgccggagtctgatgcggttgcgatgctgaaacaattatcctgagaataaatgccttggcctttatatggaaatgtggaactgagtggatatgctgtttttgtctgttaaacagagaagctggctgttatccactgagaagcgaacgaaacagtcgggaaaatctcccattatcgtagagatccgcattattaatctcaggagcctgtgtagcgtttataggaagtagtgttctgtcatgatgcctgcaagcggtaacgaaaacgatttgaatatgccttcaggaacaatagaaatcttcgtgcggtgttacgttgaagtggagcggattatgtcagcaatggacagaacaacctaatgaacacagaaccatgatgtggtctgtccttttacagccagtaggctcgccgcagtcgagcgacggcgaagccctcgagtgagcgaggaagcaccagggaacagcacttatatattctgcttacacacgatgcctgaaaaaacttcccttggggttatccacttatccacggggatatttttataattattttttttatagtttttagatcttcttttttagagcgccttgtaggcctttatccatgctggttctagagaaggtgttgtgacaaattgccctttcagtgtgacaaatcaccctcaaatgacagtcctgtctgtgacaaattgcccttaaccctgtgacaaattgccctcagaagaagctgttttttcacaaagttatccctgcttattgactcttttttatttagtgtgacaatctaaaaacttgtcacacttcacatggatctgtcatggcggaaacagcggttatcaatcacaagaaacgtaaaaatagcccgcgaatcgtccagtcaaacgacctcactgaggcggcatatagtctctcccgggatcaaaaacgtatgctgtatctgttcgttgaccagatcagaaaatctgatggcaccctacaggaacatgacggtatctgcgagatccatgttgctaaatatgctgaaatattcggattgacctctgcggaagccagtaaggatatacggcaggcattgaagagtttcgcggggaaggaagtggttttttatcgccctgaagaggatgccggcgatgaaaaaggctatgaatcttttccttggtttatcaaacgtgcgcacagtccatccagagggctttacagtgtacatatcaacccatatctcattcccttctttatcgggttacagaaccggtttacgcagtttcggcttagtgaaacaaaagaaatcaccaatccgtatgccatgcgtttatacgaatccctgtgtcagtatcgtaagccggatggctcaggcatcgtctctctgaaaatcgactggatcatagagcgttaccagctgcctcaaagttaccagcgtatgcctgacttccgccgccgcttcctgcaggtctgtgttaatgagatcaacagcagaactccaatgcgcctctcatacattgagaaaaagaaaggccgccagacgactcatatcgtattttccttccgcgatatcacttccatgacgacaggatagtctgagggttatctgtcacagatttgagggtggttcgtcacatttgttctgacctactgagggtaatttgtcacagttttgctgtttccttcagcctgcatggattttctcatactttttgaactgtaatttttaaggaagccaaatttgagggcagtttgtcacagttgatttccttctctttcccttcgtcatgtgacctgatatcgggggttagttcgtcatcattgatgagggttgattatcacagtttattactctgaattggctatccgcgtgtgtacctctacctggagtttttcccacggtggatatttcttcttgcgctgagcgtaagagctatctgacagaacagttcttctttgcttcctcgccagttcgctcgctatgctcggttacacggctgcggcgagcgctagtgataataagtgactgaggtatgtgctcttcttatctccttttgtagtgttgctcttattttaaacaactttgcggttttttgatgactttgcgattttgttgttgctttgcagtaaattgcaagatttaataaaaaaacgcaaagcaatgattaaaggatgttcagaatgaaactcatggaaacacttaaccagtgcataaacgctggtcatgaaatgacgaaggctatcgccattgcacagtttaatgatgacagcccggaagcgaggaaaataacccggcgctggagaataggtgaagcagcggatttagttggggtttcttctcaggctatcagagatgccgagaaagcagggcgactaccgcacccggatatggaaattcgaggacgggttgagcaacgtgttggttatacaattgaacaaattaatcatatgcgtgatgtgtttggtacgcgattgcgacgtgctgaagacgtatttccaccggtgatcggggttgctgcccataaaggtggcgtttacaaaacctcagtttctgttcatcttgctcaggatctggctctgaaggggctacgtgttttgctcgtggaaggtaacgacccccagggaacagcctcaatgtatcacggatgggtaccagatcttcatattcatgcagaagacactctcctgcctttctatcttggggaaaaggacgatgtcacttatgcaataaagcccacttgctggccggggcttgacattattccttcctgtctggctctgcaccgtattgaaactgagttaatgggcaaatttgatgaaggtaaactgcccaccgatccacacctgatgctccgactggccattgaaactgttgctcatgactatgatgtcatagttattgacagcgcgcctaacctgggtatcggcacgattaatgtcgtatgtgctgctgatgtgctgattgttcccacgcctgctgagttgtttgactacacctccgcactgcagtttttcgatatgcttcgtgatctgctcaagaacgttgatcttaaagggttcgagcctgatgtacgtattttgcttaccaaatacagcaatagtaatggctctcagtccccgtggatggaggagcaaattcgggatgcctggggaagcatggttctaaaaaatgttgtacgtgaaacggatgaagttggtaaaggtcagatccggatgagaactgtttttgaacaggccattgatcaacgctcttcaactggtgcctggagaaatgctctttctatttgggaacctgtctgcaatgaaattttcgatcgtctgattaaaccacgctgggagattagataatgaagcgtgcgcctgttattccaaaacatacgctcaatactcaaccggttgaagatacttcgttatcgacaccagctgccccgatggtggattcgttaattgcgcgcgtaggagtaatggctcgcggtaatgccattactttgcctgtatgtggtcgggatgtgaagtttactcttgaagtgctccggggtgatagtgttgagaagacctctcgggtatggtcaggtaatgaacgtgaccaggagctgcttactgaggacgcactggatgatctcatcccttcttttctactgactggtcaacagacaccggcgttcggtcgaagagtatctggtgtcatagaaattgccgatgggagtcgccgtcgtaaagctgctgcacttaccgaaagtgattatcgtgttctggttggcgagctggatgatgagcagatggctgcattatccagattgggtaacgattatcgcccaacaagtgcttatgaacgtggtcagcgttatgcaagccgattgcagaatgaatttgctggaaatatttctgcgctggctgatgcggaaaatatttcacgtaagattattacccgctgtatcaacaccgccaaattgcctaaatcagttgttgctcttttttctcaccccggtgaactatctgcccggtcaggtgatgcacttcaaaaagcctttacagataaagaggaattacttaagcagcaggcatctaaccttcatgagcagaaaaaagctggggtgatatttgaagctgaagaagttatcactcttttaacttctgtgcttaaaacgtcatctgcatcaagaactagtttaagctcacgacatcagtttgctcctggagcgacagtattgtataagggcgataaaatggtgcttaacctggacaggtctcgtgttccaactgagtgtatagagaaaattgaggccattcttaaggaacttgaaaagccagcaccctgatgcgaccacgttttagtctacgtttatctgtctttacttaatgtcctttgttacaggccagaaagcataactggcctgaatattctctctgggcccactgttccacttgtatcgtcggtctgataatcagactgggaccacggtcccactcgtatcgtcggtctgattattagtctgggaccacggtcccactcgtatcgtcggtctgattattagtctgggaccacggtcccactcgtatcgtcggtctgataatcagactgggaccacggtcccactcgtatcgtcggtctgattattagtctgggaccatggtcccactcgtatcgtcggtctgattattagtctgggaccacggtcccactcgtatcgtcggtctgattattagtctggaaccacggtcccactcgtatcgtcggtctgattattagtctgggaccacggtcccactcgtatcgtcggtctgattattagtctgggaccacgatcccactcgtgttgtcggtctgattatcggtctgggaccacggtcccacttgtattgtcgatcagactatcagcgtgagactacgattccatcaatgcctgtcaagggcaagtattgacatgtcgtcgtaacctgtagaacggagtaacctcggtgtgcggttgtatgcctgctgtggattgctgctgtgtcctgcttatccacaacattttgcgcacggttatgtggacaaaatacctggttacccaggccgtgccggcacgttaaccgggctgcatccgatgcaagtgtgtcgctgtcgagttt

SEQ ID NO: 56 - DNA, 23452 bp, Artificial Sequence
  Description of Artificial Sequence: Synthetic polynucleotide
aaacggatccttcgaaacgaaattaatacgactcactatagggaagtttttcgcgtctgatgaggccgttaggccgaaactcctctccggagtcacgcgaaaaaatgcgtacaacaaacttgcataaaccaaaaaaatggggcaaataagaatttgataagtaccacttaaatttaactcccttgcttagcgatggtgagcgagctgattaaggagaacatgcacatgaagctgtacatggagggcaccgtgaacaaccaccacttcaagtgcacatccgagggcgaaggcaagccctacgagggcacccagaccatgagaatcaaggcggtcgagggcggccctctccccttcgccttcgacatcctggctaccagcttcatgtacggcagcaaaaccttcatcaaccacacccagggcatccccgacttctttaagcagtccttccccgagggcttcacatgggagagagtcaccacatacgaagacgggggcgtgctgaccgctacccaggacaccagcctccaggacggctgcctcatctacaacgtcaagatcagaggggtgaacttcccatccaacggccctgtgatgcagaagaaaacactcggctgggaggcctccaccgagaccctgtaccccgctgacggcggcctggaaggcagagccgacatggccctgaagctcgtgggcgggggccacctgatctgcaacttgaagaccacatacagatccaagaaacccgctaagaacctcaagatgcccggcgtctactatgtggacagaagactggaaagaatcaaggaggccgacaaagagacctacgtcgagcagcacgaggtggctgtggccagatactgcgacctccctagcaaactggggcacagatgagtattcaattatagttattaaaaacttaacagaagacaaaaatggggcaaataagaatttgataagtaccacttaaatttaactcccttgcttagcgatgggttcgaattcgctatcgatgataaaagtacgtctacaaaatctatttgataatgatgaagtagcgctactaaaaataacgtgttatacggataaactaatacatctaacgaatgcgctagcgaaagcggtaatacatacgataaaactaaatggtatagtatttgtacatgtaataacgtcgtcggatatatgtccgaataataatatagtagtaaaatcgaattttacgacgatgccggtactacaaaatggtggttatatatgggaaatgatggaactaacgcattgttcgcaaccgaatggtctactagatgataattgtgaaataaaattttcgaaaaaactatcggattcgacgatgacgaattatatgaatcaactatcggaactactaggttttgatctaaatccgtaaattataattaatatcaactagcaaatcaatgtcactaacaccattagttaatataaaacttaacagaagacaaaaatggggcaaataaatcaattcagccaacccaaccatggatacgacgcataatgataatacgccgcaacgtctaatgataacggatatgcgtccgctatcgctagaaacgataataacgtcgctaacgcgtgatataataacgcataaatttatatatctaataaatcatgaatgtatagtacgtaaactagatgaacgtcaagcgacgtttacgtttctagtaaattatgaaatgaaactactacataaagtaggttcgacgaaatataaaaaatatacggaatataatacgaaatatggtacgtttccgatgccgatatttataaatcatgatggttttctagaatgtataggtataaaaccgacgaaacatacgccgataatatataaatatgatctaaatccgtaaatttcaacacaatattcacacaatctaaaacaacaactctatgcataactatactccatagtccagatggagcctgaaaattatagtaatttaaaattaaggagagatataagatagaagatggggcaaatacaaagatggctcttagcaaagtcaagttgaatgatacactcaacaaagatcaacttctgtcatccagcaaatacaccatccaacggagcacaggagatagtattgatactcctaattatgatgtgcagaaacacatcaataagttatgtggcatgttattaatcacagaagatgctaatcataaattcactgggttaataggtatgttatatgcgatgtctaggttaggaagagaagacaccataaaaatactcagagatgcgggatatcatgtaaaagcaaatggagtagatgtaacaacacatcgtcaagacattaatggaaaagaaatgaaatttgaagtgttaacattggcaagcttaacaactgaaattcaaatcaacattgagatagaatctagaaaatcctacaaaaaaatgctaaaagaaatgggagaggtagctccagaatacaggcatgactctcctgattgtgggatgataatattatgtatagcagcattagtaataactaaattagcagcaggggacagatctggtcttacagccgtgattaggagagctaataatgtcctaaaaaatgaaatgaaacgttacaaaggcttactacccaaggacatagccaacagcttctatgaagtgtttgaaaaacatccccactttatagatgtttttgttcattttggtatagcacaatcttctaccagaggtggcagtagagttgaagggatttttgcaggattgtttatgaatgcctatggtgcagggcaagtgatgttacggtggggagtcttagcaaaatcagttaaaaatattatgttaggacatgctagtgtgcaagcagaaatggaacaagttgttgaggtttatgaatatgcccaaaaattgggtggtgaagcaggattctaccatatattgaacaacccaaaagcatcattattatctttgactcaatttcctcacttctccagtgtagtattaggcaatgctgctggcctaggcataatgggagagtacagaggtacaccgaggaatcaagatctatatgatgcagcaaaggcatatgctgaacaactcaaagaaaatggtgtgattaactacagtgtactagacttgacagcagaagaactagaggctatcaaacatcagcttaatccaaaagataatgatgtagagctttgagttaataaaaaatggggcaaataaatcatcatggaaaagtttgctcctgaattccatggagaagatgcaaacaacagggctactaaattcctagaatcaataaagggcaaattcacatcacccaaagatcccaagaaaaaagatagtatcatatctgtcaactcaatagatatagaagtaaccaaagaaagccctataacatcaaattcaactattatcaacccaacaaatgagacagatgatactgcagggaacaagcccaattatcaaagaaaacctctagtaagtttcaaagaagaccctacaccaagtgataatcccttttctaaactatacaaagaaaccatagaaacatttgataacaatgaagaagaatccagctattcatacgaagaaataaatgatcagacaaacgataatataacagcaagattagataggattgatgaaaaattaagtgaaatactaggaatgcttcacacattagtagtggcaagtgcaggacctacatctgctcgggatggtataagagatgccatgattggtttaagagaagaaatgatagaaaaaatcagaactgaagcattaatgaccaatgacagattagaagctatggcaagactcaggaatgaggaaagtgaaaagatggcaaaagacacatcagatgaagtgtctctcaatccaacatcagagaaattgaacaacctattggaagggaatgatagtgacaatgatctatcacttgaagatttctgattagttaccactcttcacatcaacacacaataccaacagaagaccaacaaactaaccaacccaatcatccaaccaaacatccatccgccaatcagccaaacagccaacaaaacaaccagccaatccaaaactaaccacccggaaaaaatctataatatagttacaaaaaaaggaaagggtggggcaaatatggaaacatacgtgaacaagcttcacgaaggctccacatacacagctgctgttcaatacaatgtcttagaaaaagacgatgaccctgcatcacttacaatatgggtgcccatgttccaatcatctatgccagcagatttacttataaaagaactagctaatgtcaacatactagtgaaacaaatatccacacccaagggaccttcactaagagtcatgataaactcaagaagtgcagtgctagcacaaatgcccagcaaatttaccatatgcgctaatgtgtccttggatgaaagaagcaaactagcatatgatgtaaccacaccctgtgaaatcaaggcatgtagtctaacatgcctaaaatcaaaaaatatgttgactacagttaaagatctcactatgaagacactcaaccctacacatgatattattgctttatgtgaatttgaaaacatagtaacatcaaaaaaagtcataataccaacatacctaagatccatcagtgtcagaaataaagatctgaacacacttgaaaatataacaaccactgaattcaaaaatgctatcacaaatgcaaaaatcatcccttactcaggattactattagtcatcacagtgactgacaacaaaggagcattcaaatacataaagccacaaagtcaattcatagtagatcttggagcttacctagaaaaagaaagtatatattatgttaccacaaattggaagcacacagctacacgatttgcaatcaaacccatggaagattaacctttttcctctacatcagtgtgttaattcatacaaactttctacctacattcttcacttcaccatcacaatcacaaacactctgtggttcaaccaatcaaacaaaacttatctgaagtcccagatcatcccaagtcattgtttatcagatctagtactcaaataagttaataaaaaatatacacatggacgtccatggggcaaatgcaaacatgtttgtttttcttgttttattgccactagtctctagtcagtgtgttaatcttacaaccagaactcaattaccccctgcatacactaattctttcacacgtggtgtttattaccctgacaaagttttcagatcctcagttttacattcaactcaggacttgttcttacctttcttttccaatgttacttggttccatgctatacatgtctctgggaccaatggtactaagaggtttgataaccctgtcctaccatttaatgatggtgtttattttgcttccactgagaagtctaacataataagaggctggatttttggtactactttagattcgaagacccagtccctacttattgttaataacgctactaatgttgttattaaagtctgtgaatttcaattttgtaatgatccatttttgggtgtttattaccacaaaaacaacaaaagttggatggaaagtgagttcagagtttattctagtgcgaataattgcacttttgaatatgtctctcagccttttcttatggaccttgaaggaaaacagggtaatttcaaaaatcttagggaatttgtgtttaagaatattgatggttattttaaaatatattctaagcacacgcctattaatttagtgcgtgatctccctcagggtttttcggctttagaaccattggtagatttgccaataggtattaacatcactaggtttcaaactttacttgctttacatagaagttatttgactcctggtgattcttcttcaggttggacagctggtgctgcagcttattatgtgggttatcttcaacctaggacttttctattaaaatataatgaaaatggaaccattacagatgctgtagactgtgcacttgaccctctctcagaaacaaagtgtacgttgaaatccttcactgtagaaaaaggaatctatcaaacttctaactttagagtccaaccaacagaatctattgttagatttcctaatattacaaacttgtgcccttttggtgaagtttttaacgccaccagatttgcatctgtttatgcttggaacaggaagagaatcagcaactgtgttgctgattattctgtcctatataattccgcatcattttccacttttaagtgttatggagtgtctcctactaaattaaatgatctctgctttactaatgtctatgcagattcatttgtaattagaggtgatgaagtcagacaaatcgctccagggcaaactggaaagattgctgattataattataaattaccagatgattttacaggctgcgttatagcttggaattctaacaatcttgattctaaggttggtggtaattataattacctgtatagattgtttaggaagtctaatctcaaaccttttgagagagatatttcaactgaaatctatcaggccggtagcacaccttgtaatggtgttgaaggttttaattgttactttcctttacaatcatatggtttccaacccactaatggtgttggttaccaaccatacagagtagtagtactttcttttgaacttctacatgcaccagcaactgtttgtggacctaaaaagtctactaatttggttaaaaacaaatgtgtcaatttcaacttcaatggtttaacaggcacaggtgttcttactgagtctaacaaaaagtttctgcctttccaacaatttggcagagacattgctgacactactgatgctgtccgtgatccacagacacttgagattcttgacattacaccatgttcttttggtggtgtcagtgttataacaccaggaacaaatacttctaaccaggttgctgttctttatcaggatgttaactgcacagaagtccctgttgctattcatgcagatcaacttactcctacttggcgtgtttattctacaggttctaatgtttttcaaacacgtgcaggctgtttaataggggctgaacatgtcaacaactcatatgagtgtgacatacccattggtgcaggtatatgcgctagttatcagactcagactaattctcctcggcgggcacgtagtgtagctagtcaatccatcattgcctacactatgtcacttggtgcagaaaattcagttgcttactctaataactctattgccatacccacaaattttactattagtgttaccacagaaattctaccagtgtctatgaccaagacatcagtagattgtacaatgtacatttgtggtgattcaactgaatgcagcaatcttttgttgcaatatggcagtttttgtacacaattaaaccgtgctttaactggaatagctgttgaacaagacaaaaacacccaagaagtttttgcacaagtcaaacaaatttacaaaacaccaccaattaaagattttggtggttttaatttttcacaaatattaccagatccatcaaaaccaagcaagaggtcatttattgaagatctacttttcaacaaagtgacacttgcagatgctggcttcatcaaacaatatggtgattgccttggtgatattgctgctagagacctcatttgtgcacaaaagtttaacggccttactgttttgccacctttgctcacagatgaaatgattgctcaatacacttctgcactgttagcgggtacaatcacttctggttggacctttggtgcaggtgctgcattacaaataccatttgctatgcaaatggcttataggtttaatggtattggagttacacagaatgttctctatgagaaccaaaaattgattgccaaccaatttaatagtgctattggcaaaattcaagactcactttcttccacagcaagtgcacttggaaaacttcaagatgtggtcaaccaaaatgcacaagctttaaacacgcttgttaaacaacttagctccaattttggtgcaatttcaagtgttttaaatgatatcctttcacgtcttgacaaagttgaggctgaagtgcaaattgataggttgatcacaggcagacttcaaagtttgcagacatatgtgactcaacaattaattagagctgcagaaatcagagcttctgctaatcttgctgctactaaaatgtcagagtgtgtacttggacaatcaaaaagagttgatttttgtggaaagggctatcatcttatgtccttccctcagtcagcacctcatggtgtagtcttcttgcatgtgacttatgtccctgcacaagaaaagaacttcacaactgctcctgccatttgtcatgatggaaaagcacactttcctcgtgaaggtgtctttgtttcaaatggcacacactggtttgtaacacaaaggaatttttatgaaccacaaatcattactacagacaacacatttgtgtctggtaactgtgatgttgtaataggaattgtcaacaacacagtttatgatcctttgcaacctgaattagactcattcaaggaggagttagataaatattttaagaatcatacatcaccagatgttgatttaggtgacatctctggcattaatgcttcagttgtaaacattcaaaaagaaattgaccgcctcaatgaggttgccaagaatttaaatgaatctctcatcgatctccaagaacttggaaagtatgagcagtatataaaatggccatggtacatttggctaggttttatagctggcttgattgccatagtaatggtgacaattatgctttgctgtatgaccagttgctgtagttgtctcaagggctgttgttcttgtggatcctgctgcaaatttgatgaagacgacggactgctcctatactgtaaggccagaagcacaccaatcacactaagcaaggatcaactgagtggtataaataatattgcatttagtaactaaataaaaatagcacctaatcatgttcttacaatggtttactatctgctcatagacaacccatctatcattggattttcttaaaatctgaacttcatcgaaactcttatctataaaccatctcacttacactatttaagtagattcctagtttatagttatataaaacacaattgaatgccagtcgaccttaccatctgtaaaaatgaaaactggggcaaatatgtcacgaaggaatccttgcaaatttgaaattcgaggtcattgcttaaatggtaagaggtgtcattttagtcataattattttgaatggccaccccatgcactgcttgtaagacaaaactttatgttaaacagaatacttaagtctatggataaaagtatagataccttatcagaaataagtggagctgcagagttggacagaacagaagagtatgctcttggtgtagttggagtgctagagagttatataggatcaataaacaatataactaaacaatcagcatgtgttgccatgagcaaactcctcactgaactcaatagtgatgatatcaaaaagctgagggacaatgaagagctaaattcacccaagataagagtgtacaatactgtcatatcatatattgaaagcaacaggaaaaacaataaacaaactatccatctgttaaaaagattgccagcagacgtattgaagaaaaccatcaaaaacacattggatatccataagagcataaccatcaacaacccaaaagaatcaactgttagtgatacaaatgaccatgccaaaaataatgatactacctgacaaatatccttgtagtataacttccatactaataacaagtagatgtagagttactatgtataatcaaaagaacacactatatttcaatcaaaacaacccaaataaccatatgtactcaccgaatcaaacattcaatgaaatccattggacctctcaagaattgattgacacaattcaaaattttctacaacatctaggtattattgaggatatatatacaatatatatattagtgtcataacactcaattctaacactcaccacatcgttacattattaattcaaacaattcaagttgtgggacaaaatggatcccattattaatggaaattctgctaatgtttatctaaccgatagttatttaaaaggtgttatctctttctcagagtgtaatgctttaggaagttacatattcaatggtccttatctcaaaaatgattataccaacttaattagtagacaaaatccattaatagaacacatgaatctaaagaaactaaatataacacagtccttaatatctaagtatcataaaggtgaaataaaattagaagaacctacttattttcagtcattacttatgacatacaagagtatgacctcgtcagaacagattgctaccactaatttacttaaaaagataataagaagagctatagaaataagtgatgtcaaagtctatgctatattgaataaactagggcttaaagaaaaggacaagattaaatccaacaatggacaagatgaagacaactcagttattacgaccataatcaaagatgatatactttcagctgttaaagataatcaatctcatcttaaagcagacaaaaatcactctacaaaacaaaaagacacaatcaaaacaacactcttgaagaaattgatgtgttcaatgcaacatcctccatcatggttaatacattggtttaacttatacacaaaattaaacaacatattaacacagtatcgatcaaatgaggtaaaaaaccatgggtttacattgatagataatcaaactcttagtggatttcaatttattttgaaccaatatggttgtatagtttatcataaggaactcaaaagaattactgtgacaacctataatcaattcttgacatggaaagatattagccttagtagattaaatgtttgtttaattacatggattagtaactgcttgaacacattaaataaaagcttaggcttaagatgcggattcaataatgttatcttgacacaactattcctttatggagattgtatactaaagctatttcacaatgaggggttctacataataaaagaggtagagggatttattatgtctctaattttaaatataacagaagaagatcaattcagaaaacgattttataatagtatgctcaacaacatcacagatgctgctaataaagctcagaaaaatctgctatcaagagtatgtcatacattattagataagacagtgtccgataatataataaatggcagatggataattctattaagtaagttccttaaattaattaagcttgcaggtgacaataaccttaacaatctgagtgaactatattttttgttcagaatatttggacacccaatggtagatgaaagacaagccatggatgctgttaaaattaattgcaatgagaccaaattttacttgttaagcagtctgagtatgttaagaggtgcctttatatatagaattataaaagggtttgtaaataattacaacagatggcctactttaagaaatgctattgttttacccttaagatggttaacttactataaactaaacacttatccttctttgttggaacttacagaaagagatttgattgtgttatcaggactacgtttctatcgtgagtttcggttgcctaaaaaagtggatcttgaaatgattataaatgataaagctatatcacctcctaaaaatttgatatggactagtttccctagaaattacatgccatcacacatacaaaactatatagaacatgaaaaattaaaattttccgagagtgataaatcaagaagagtattagagtattatttaagagataacaaattcaatgaatgtgatttatacaactgtgtagttaatcaaagttatctcaacaaccctaatcatgtggtatcattgacaggcaaagaaagagaactcagtgtaggtagaatgtttgcaatgcaaccgggaatgttcagacaggttcaaatattggcagagaaaatgatagctgaaaacattttacaattctttcctgaaagtcttacaagatatggtgatctagaactacaaaaaatattagaattgaaagcaggaataagtaacaaatcaaatcgctacaatgataattacaacaattacattagtaagtgctctatcatcacagatctcagcaaattcaatcaagcatttcgatatgaaacgtcatgtatttgtagtgatgtgctggatgaactgcatggtgtacaatctctattttcctggttacatttaactattcctcatgtcacaataatatgcacatataggcatgcacccccctatataggagatcatattgtagatcttaacaatgtagatgaacaaagtggattatatagatatcacatgggtggcatcgaagggtggtgtcaaaaactgtggaccatagaagctatatcactattggatctaatatctctcaaagggaaattctcaattactgctttaattaatggtgacaatcaatcaatagatataagcaaaccaatcagactcatggaaggtcaaactcatgctcaagcagattatttgctagcattaaatagccttaaattactgtataaagagtatgcaggcataggccacaaattaaaaggaactgagacttatatatcacgagatatgcaatttatgagtaaaacaattcaacataacggtgtatattacccagctagtataaagaaagtcctaagagtgggaccgtggataaacactatacttgatgatttcaaagtgagtctagaatctataggtagtttgacacaagaattagaatatagaggtgaaagtctattatgcagtttaatatttagaaatgtatggttatataatcagattgctctacaattaaaaaatcatgcattatgtaacaataaactatatttggacatattaaaggttctgaaacacttaaaaaccttttttaatcttgataatattgatacagcattaacattgtatatgaatttacccatgttatttggtggtggtgatcccaacttgttatatcgaagtttctatagaagaactcctgacttcctcacagaggctatagttcactctgtgttcatacttagttattatacaaaccatgacttaaaagataaacttcaagatctgtcagatgatagattgaataagttcttaacatgcataatcacgtttgacaaaaaccctaatgctgaattcgtaacattgatgagagatcctcaagctttagggtctgagagacaagctaaaattactagcgaaatcaatagactggcagttacagaggttttgagtacagctccaaacaaaatattctccaaaagtgcacaacattatactactacagagatagatctaaatgatattatgcaaaatatagaacctacatatcctcatgggctaagagttgtttatgaaagtttacccttttataaagcagagaaaatagtaaatcttatatcaggtacaaaatctataactaacatactggaaaaaacttctgccatagacttaacagatattgatagagccactgagatgatgaggaaaaacataactttgcttataaggatacttccattggattgtaacagagataaaagagagatattgagtatggaaaacctaagtattactgaattaagcaaatatgttagggaaagatcttggtctttatccaatatagttggtgttacatcacccagtatcatgtatacaatggacatcaaatatactacaagcactatatctagtggcataattatagagaaatataatgttaacagtttaacacgtggtgagagaggacccactaaaccatgggttggttcatctacacaagagaaaaaaacaatgccagtttataatagacaagtcttaaccaaaaaacagagagatcaaatagatctattagcaaaattggattgggtgtatgcatctatagataacaaggatgaattcatggaagaactcagcataggaacccttgggttaacatatgaaaaggccaagaaattatttccacaatatttaagtgtcaattatttgcatcgccttacagtcagtagtagaccatgtgaattccctgcatcaataccagcttatagaacaacaaattatcactttgacactagccctattaatcgcatattaacagaaaagtatggtgatgaagatattgacatagtattccaaaactgtataagctttggccttagtttaatgtcagtagtagaacaatttactaatgtatgtcctaacagaattattctcatacctaagcttaatgagatacatttgatgaaacctcccatattcacaggtgatgttgatattcacaagttaaaacaagtgatacaaaaacagcatatgtttttaccagacaaaataagtttgactcaatatgtggaattattcttaagtaataaaacactcaaatctggatctcatgttaattctaatttaatattggcacataaaatatctgactattttcataatacttacattttaagtactaatttagctggacattggattctgattatacaacttatgaaagattctaaaggtatttttgaaaaagattggggagagggatatataactgatcatatgtttattaatttgaaagttttcttcaatgcttataagacctatctcttgtgttttcataaaggttatggcaaagcaaagctggagtgtgatatgaacacttcagatcttctatgtgtattggaattaatagacagtagttattggaagtctatgtctaaggtatttttagaacaaaaagttatcaaatacattcttagccaagatgcaagtttacatagagtaaaaggatgtcatagcttcaaattatggtttcttaaacgtcttaatgtagcagaattcacagtttgcccttgggttgttaacatagattatcatccaacacatatgaaagcaatattaacttatatagatcttgttagaatgggattgataaatatagatagaatacacattaaaaataaacacaaattcaatgatgaattttatacttctaatctcttctacattaattataacttctcagataatactcatctattaactaaacatataaggattgctaattctgaattagaaaataattacaacaaattatatcatcctacaccagaaaccctagagaatatactagccaatccgattaaaagtaatgacaaaaagacactgaatgactattgtataggtaaaaatgttgactcaataatgttaccattgttatctaataagaagcttattaaatcgtctgcaatgattagaaccaattacagcaaacaagatttgtataatttattccctatggttgtgattgatagaattatagatcattcaggcaatacagccaaatccaaccaactttacactactacttcccaccaaatatctttagtgcacaatagcacatcactttactgcatgcttccttggcatcatattaatagattcaattttgtatttagttctacaggttgtaaaattagtatagagtatattttaaaagatcttaaaattaaagatcccaattgtatagcattcataggtgaaggagcagggaatttattattgcgtacagtagtggaacttcatcctgacataagatatatttacagaagtctgaaagattgcaatgatcatagtttacctattgagtttttaaggctgtacaatggacatatcaacattgattatggtgaaaatttgaccattcctgctacagatgcaaccaacaacattcattggtcttatttacatataaagtttgctgaacctatcagtctttttgtctgtgatgccgaattgtctgtaacagtcaactggagtaaaattataatagaatggagcaagcatgtaagaaagtgcaagtactgttcctcagttaataaatgtatgttaatagtaaaatatcatgctcaagatgatattgatttcaaattagacaatataactatattaaaaacttatgtatgcttaggcagtaagttaaagggatcggaggtttacttagtccttacaataggtcctgcgaatatattcccagtatttaatgtagtacaaaatgctaaattgatactatcaagaaccaaaaatttcatcatgcctaagaaagctgataaagagtctattgatgcaaatattaaaagtttgataccctttctttgttaccctataacaaaaaaaggaattaatactgcattgtcaaaactaaagagtgttgttagtggagatatactatcatattctatagctggacgtaatgaagttttcagcaataaacttataaatcataagcatatgaacatcttaaaatggttcaatcatgttttaaatttcagatcaacagaactaaactataaccatttatatatggtagaatctacatatccttacctaagtgaattgttaaacagcttgacaaccaatgaacttaaaaaactgattaaaatcacaggtagtctgttatacaactttcataatgaataatgaataaagatcttataataaaaattcccatagctatacactaacactgtattcaattatagttattaaaaattaaaaatcgtacgattttttaaataacttttagtgaactaatcctaaagttatcattttaatcttggaggaataaatttaaaccctaatctaattggtttatatgtgtattaactaaattacgagatattagtttttgacactttttttctcgtgggtcggcatggcatctccacctcctcgcggtccgacctgggcatccgaaggaggacgcacgtccactcggatggctaagggagctgctaacaaagcccgaaaggaagctgagttggctgctgccaccgctgagcaataactagcataaccccttggggcctctaaacgggtcttgaggggttttttgctgaaaggaggaactatatacgcgtaagcttctcgacccattctcatgtttgacagcttatcatcgaatttctgccattcatccgcttattatcacttattcaggcgtagcaaccaggcgtttaagggcaccaataactgccttaaaaaaattacgccccgccctgccactcatcgcagtactgttgtaattcattaagcattctgccgacatggaagccatcacagacggcatgatgaacctgaatcgccagcggcatcagcaccttgtcgccttgcgtataatatttgcccatggtgaaaacgggggcgaagaagttgtccatattggccacgtttaaatcaaaactggtgaaactcacccagggattggctgagacgaaaaacatattctcaataaaccctttagggaaataggccaggttttcaccgtaacacgccacatcttgcgaatatatgtgtagaaactgccggaaatcgtcgtggtattcactccagagcgatgaaaacgtttcagtttgctcatggaaaacggtgtaacaagggtgaacactatcccatatcaccagctcaccgtctttcattgccatacggaattccggatgagcattcatcaggcgggcaagaatgtgaataaaggccggataaaacttgtgcttatttttctttacggtctttaaaaaggccgtaatatccagctgaacggtctggttataggtacattgagcaactgactgaaatgcctcaaaatgttctttacgatgccattgggatatatcaacggtggtatatccagtgatttttttctccattttagcttccttagctcctgaaaatctcgataactcaaaaaatacgcccggtagtgatcttatttcattatggtgaaagttggaacctcttacgtgccgatcaacgtctcattttcgccaaaagttggcccagggcttcccggtatcaacagggacaccaggatttatttattctgcgaagtgatcttccgtcacaggtatttattcgcgataagctcatggagcggcgtaaccgtcgcacaggaaggacagagaaagcgcggatctgggaagtgacggacagaacggtcaggacctggattggggaggcggttgccgccgctgctgctgacggtgtgacgttctctgttccggtcacaccacatacgttccgccattcctatgcgatgcacatgctgtatgccggtataccgctgaaagttctgcaaagcctgatgggacataagtccatcagttcaacggaagtctacacgaaggtttttgcgctggatgtggctgcccggcaccgggtgcagtttgcgatgccggagtctgatgcggttgcgatgctgaaacaattatcctgagaataaatgccttggcctttatatggaaatgtggaactgagtggatatgctgtttttgtctgttaaacagagaagctggctgttatccactgagaagcgaacgaaacagtcgggaaaatctcccattatcgtagagatccgcattattaatctcaggagcctgtgtagcgtttataggaagtagtgttctgtcatgatgcctgcaagcggtaacgaaaacgatttgaatatgccttcaggaacaatagaaatcttcgtgcggtgttacgttgaagtggagcggattatgtcagcaatggacagaacaacctaatgaacacagaaccatgatgtggtctgtccttttacagccagtaggctcgccgcagtcgagcgacggcgaagccctcgagtgagcgaggaagcaccagggaacagcacttatatattctgcttacacacgatgcctgaaaaaacttcccttggggttatccacttatccacggggatatttttataattattttttttatagtttttagatcttcttttttagagcgccttgtaggcctttatccatgctggttctagagaaggtgttgtgacaaattgccctttcagtgtgacaaatcaccctcaaatgacagtcctgtctgtgacaaattgcccttaaccctgtgacaaattgccctcagaagaagctgttttttcacaaagttatccctgcttattgactcttttttatttagtgtgacaatctaaaaacttgtcacacttcacatggatctgtcatggcggaaacagcggttatcaatcacaagaaacgtaaaaatagcccgcgaatcgtccagtcaaacgacctcactgaggcggcatatagtctctcccgggatcaaaaacgtatgctgtatctgttcgttgaccagatcagaaaatctgatggcaccctacaggaacatgacggtatctgcgagatccatgttgctaaatatgctgaaatattcggattgacctctgcggaagccagtaaggatatacggcaggcattgaagagtttcgcggggaaggaagtggttttttatcgccctgaagaggatgccggcgatgaaaaaggctatgaatcttttccttggtttatcaaacgtgcgcacagtccatccagagggctttacagtgtacatatcaacccatatctcattcccttctttatcgggttacagaaccggtttacgcagtttcggcttagtgaaacaaaagaaatcaccaatccgtatgccatgcgtttatacgaatccctgtgtcagtatcgtaagccggatggctcaggcatcgtctctctgaaaatcgactggatcatagagcgttaccagctgcctcaaagttaccagcgtatgcctgacttccgccgccgcttcctgcaggtctgtgttaatgagatcaacagcagaactccaatgcgcctctcatacattgagaaaaagaaaggccgccagacgactcatatcgtattttccttccgcgatatcacttccatgacgacaggatagtctgagggttatctgtcacagatttgagggtggttcgtcacatttgttctgacctactgagggtaatttgtcacagttttgctgtttccttcagcctgcatggattttctcatactttttgaactgtaatttttaaggaagccaaatttgagggcagtttgtcacagttgatttccttctctttcccttcgtcatgtgacctgatatcgggggttagttcgtcatcattgatgagggttgattatcacagtttattactctgaattggctatccgcgtgtgtacctctacctggagtttttcccacggtggatatttcttcttgcgctgagcgtaagagctatctgacagaacagttcttctttgcttcctcgccagttcgctcgctatgctcggttacacggctgcggcgagcgctagtgataataagtgactgaggtatgtgctcttcttatctccttttgtagtgttgctcttattttaaacaactttgcggttttttgatgactttgcgattttgttgttgctttgcagtaaattgcaagatttaataaaaaaacgcaaagcaatgattaaaggatgttcagaatgaaactcatggaaacacttaaccagtgcataaacgctggtcatgaaatgacgaaggctatcgccattgcacagtttaatgatgacagcccggaagcgaggaaaataacccggcgctggagaataggtgaagcagcggatttagttggggtttcttctcaggctatcagagatgccgagaaagcagggcgactaccgcacccggatatggaaattcgaggacgggttgagcaacgtgttggttatacaattgaacaaattaatcatatgcgtgatgtgtttggtacgcgattgcgacgtgctgaagacgtatttccaccggtgatcggggttgctgcccataaaggtggcgtttacaaaacctcagtttctgttcatcttgctcaggatctggctctgaaggggctacgtgttttgctcgtggaaggtaacgacccccagggaacagcctcaatgtatcacggatgggtaccagatcttcatattcatgcagaagacactctcctgcctttctatcttggggaaaaggacgatgtcacttatgcaataaagcccacttgctggccggggcttgacattattccttcctgtctggctctgcaccgtattgaaactgagttaatgggcaaatttgatgaaggtaaactgcccaccgatccacacctgatgctccgactggccattgaaactgttgctcatgactatgatgtcatagttattgacagcgcgcctaacctgggtatcggcacgattaatgtcgtatgtgctgctgatgtgctgattgttcccacgcctgctgagttgtttgactacacctccgcactgcagtttttcgatatgcttcgtgatctgctcaagaacgttgatcttaaagggttcgagcctgatgtacgtattttgcttaccaaatacagcaatagtaatggctctcagtccccgtggatggaggagcaaattcgggatgcctggggaagcatggttctaaaaaatgttgtacgtgaaacggatgaagttggtaaaggtcagatccggatgagaactgtttttgaacaggccattgatcaacgctcttcaactggtgcctggagaaatgctctttctatttgggaacctgtctgcaatgaaattttcgatcgtctgattaaaccacgctgggagattagataatgaagcgtgcgcctgttattccaaaacatacgctcaatactcaaccggttgaagatacttcgttatcgacaccagctgccccgatggtggattcgttaattgcgcgcgtaggagtaatggctcgcggtaatgccattactttgcctgtatgtggtcgggatgtgaagtttactcttgaagtgctccggggtgatagtgttgagaagacctctcgggtatggtcaggtaatgaacgtgaccaggagctgcttactgaggacgcactggatgatctcatcccttcttttctactgactggtcaacagacaccggcgttcggtcgaagagtatctggtgtcatagaaattgccgatgggagtcgccgtcgtaaagctgctgcacttaccgaaagtgattatcgtgttctggttggcgagctggatgatgagcagatggctgcattatccagattgggtaacgattatcgcccaacaagtgcttatgaacgtggtcagcgttatgcaagccgattgcagaatgaatttgctggaaatatttctgcgctggctgatgcggaaaatatttcacgtaagattattacccgctgtatcaacaccgccaaattgcctaaatcagttgttgctcttttttctcaccccggtgaactatctgcccggtcaggtgatgcacttcaaaaagcctttacagataaagaggaattacttaagcagcaggcatctaaccttcatgagcagaaaaaagctggggtgatatttgaagctgaagaagttatcactcttttaacttctgtgcttaaaacgtcatctgcatcaagaactagtttaagctcacgacatcagtttgctcctggagcgacagtattgtataagggcgataaaatggtgcttaacctggacaggtctcgtgttccaactgagtgtatagagaaaattgaggccattcttaaggaacttgaaaagccagcaccctgatgcgaccacgttttagtctacgtttatctgtctttacttaatgtcctttgttacaggccagaaagcataactggcctgaatattctctctgggcccactgttccacttgtatcgtcggtctgataatcagactgggaccacggtcccactcgtatcgtcggtctgattattagtctgggaccacggtcccactcgtatcgtcggtctgattattagtctgggaccacggtcccactcgtatcgtcggtctgataatcagactgggaccacggtcccactcgtatcgtcggtctgattattagtctgggaccatggtcccactcgtatcgtcggtctgattattagtctgggaccacggtcccactcgtatcgtcggtctgattattagtctggaaccacggtcccactcgtatcgtcggtctgattattagtctgggaccacggtcccactcgtatcgtcggtctgattattagtctgggaccacgatcccactcgtgttgtcggtctgattatcggtctgggaccacggtcccacttgtattgtcgatcagactatcagcgtgagactacgattccatcaatgcctgtcaagggcaagtattgacatgtcgtcgtaacctgtagaacggagtaacctcggtgtgcggttgtatgcctgctgtggattgctgctgtgtcctgcttatccacaacattttgcgcacggttatgtggacaaaatacctggttacccaggccgtgccggcacgttaaccgggctgcatccgatgcaagtgtgtcgctgtcgagttt

SEQ ID NO: 57 - DNA, 23407 bp, Artificial Sequence
  Description of Artificial Sequence: Synthetic polynucleotide
aaacggatccttcgaaacgaaattaatacgactcactatagggaagtttttcgcgtctgatgaggccgttaggccgaaactcctctccggagtcacgcgaaaaaatgcgtacaacaaacttgcataaaccaaaaaaatggggcaaataagaatttgataagtaccacttaaatttaactcccttgcttagcgatggtgagcgagctgattaaggagaacatgcacatgaagctgtacatggagggcaccgtgaacaaccaccacttcaagtgcacatccgagggcgaaggcaagccctacgagggcacccagaccatgagaatcaaggcggtcgagggcggccctctccccttcgccttcgacatcctggctaccagcttcatgtacggcagcaaaaccttcatcaaccacacccagggcatccccgacttctttaagcagtccttccccgagggcttcacatgggagagagtcaccacatacgaagacgggggcgtgctgaccgctacccaggacaccagcctccaggacggctgcctcatctacaacgtcaagatcagaggggtgaacttcccatccaacggccctgtgatgcagaagaaaacactcggctgggaggcctccaccgagaccctgtaccccgctgacggcggcctggaaggcagagccgacatggccctgaagctcgtgggcgggggccacctgatctgcaacttgaagaccacatacagatccaagaaacccgctaagaacctcaagatgcccggcgtctactatgtggacagaagactggaaagaatcaaggaggccgacaaagagacctacgtcgagcagcacgaggtggctgtggccagatactgcgacctccctagcaaactggggcacagatgagtattcaattatagttattaaaaacttaacagaagacaaaaatggggcaaataagaatttgataagtaccacttaaatttaactcccttgcttagcgatgggttcgaattcgctatcgatgataaaagtacgtctacaaaatctatttgataatgatgaagtagcgctactaaaaataacgtgttatacggataaactaatacatctaacgaatgcgctagcgaaagcggtaatacatacgataaaactaaatggtatagtatttgtacatgtaataacgtcgtcggatatatgtccgaataataatatagtagtaaaatcgaattttacgacgatgccggtactacaaaatggtggttatatatgggaaatgatggaactaacgcattgttcgcaaccgaatggtctactagatgataattgtgaaataaaattttcgaaaaaactatcggattcgacgatgacgaattatatgaatcaactatcggaactactaggttttgatctaaatccgtaaattataattaatatcaactagcaaatcaatgtcactaacaccattagttaatataaaacttaacagaagacaaaaatggggcaaataaatcaattcagccaacccaaccatggatacgacgcataatgataatacgccgcaacgtctaatgataacggatatgcgtccgctatcgctagaaacgataataacgtcgctaacgcgtgatataataacgcataaatttatatatctaataaatcatgaatgtatagtacgtaaactagatgaacgtcaagcgacgtttacgtttctagtaaattatgaaatgaaactactacataaagtaggttcgacgaaatataaaaaatatacggaatataatacgaaatatggtacgtttccgatgccgatatttataaatcatgatggttttctagaatgtataggtataaaaccgacgaaacatacgccgataatatataaatatgatctaaatccgtaaatttcaacacaatattcacacaatctaaaacaacaactctatgcataactatactccatagtccagatggagcctgaaaattatagtaatttaaaattaaggagagatataagatagaagatggggcaaatacaaagatggctcttagcaaagtcaagttgaatgatacactcaacaaagatcaacttctgtcatccagcaaatacaccatccaacggagcacaggagatagtattgatactcctaattatgatgtgcagaaacacatcaataagttatgtggcatgttattaatcacagaagatgctaatcataaattcactgggttaataggtatgttatatgcgatgtctaggttaggaagagaagacaccataaaaatactcagagatgcgggatatcatgtaaaagcaaatggagtagatgtaacaacacatcgtcaagacattaatggaaaagaaatgaaatttgaagtgttaacattggcaagcttaacaactgaaattcaaatcaacattgagatagaatctagaaaatcctacaaaaaaatgctaaaagaaatgggagaggtagctccagaatacaggcatgactctcctgattgtgggatgataatattatgtatagcagcattagtaataactaaattagcagcaggggacagatctggtcttacagccgtgattaggagagctaataatgtcctaaaaaatgaaatgaaacgttacaaaggcttactacccaaggacatagccaacagcttctatgaagtgtttgaaaaacatccccactttatagatgtttttgttcattttggtatagcacaatcttctaccagaggtggcagtagagttgaagggatttttgcaggattgtttatgaatgcctatggtgcagggcaagtgatgttacggtggggagtcttagcaaaatcagttaaaaatattatgttaggacatgctagtgtgcaagcagaaatggaacaagttgttgaggtttatgaatatgcccaaaaattgggtggtgaagcaggattctaccatatattgaacaacccaaaagcatcattattatctttgactcaatttcctcacttctccagtgtagtattaggcaatgctgctggcctaggcataatgggagagtacagaggtacaccgaggaatcaagatctatatgatgcagcaaaggcatatgctgaacaactcaaagaaaatggtgtgattaactacagtgtactagacttgacagcagaagaactagaggctatcaaacatcagcttaatccaaaagataatgatgtagagctttgagttaataaaaaatggggcaaataaatcatcatggaaaagtttgctcctgaattccatggagaagatgcaaacaacagggctactaaattcctagaatcaataaagggcaaattcacatcacccaaagatcccaagaaaaaagatagtatcatatctgtcaactcaatagatatagaagtaaccaaagaaagccctataacatcaaattcaactattatcaacccaacaaatgagacagatgatactgcagggaacaagcccaattatcaaagaaaacctctagtaagtttcaaagaagaccctacaccaagtgataatcccttttctaaactatacaaagaaaccatagaaacatttgataacaatgaagaagaatccagctattcatacgaagaaataaatgatcagacaaacgataatataacagcaagattagataggattgatgaaaaattaagtgaaatactaggaatgcttcacacattagtagtggcaagtgcaggacctacatctgctcgggatggtataagagatgccatgattggtttaagagaagaaatgatagaaaaaatcagaactgaagcattaatgaccaatgacagattagaagctatggcaagactcaggaatgaggaaagtgaaaagatggcaaaagacacatcagatgaagtgtctctcaatccaacatcagagaaattgaacaacctattggaagggaatgatagtgacaatgatctatcacttgaagatttctgattagttaccactcttcacatcaacacacaataccaacagaagaccaacaaactaaccaacccaatcatccaaccaaacatccatccgccaatcagccaaacagccaacaaaacaaccagccaatccaaaactaaccacccggaaaaaatctataatatagttacaaaaaaaggaaagggtggggcaaatatggaaacatacgtgaacaagcttcacgaaggctccacatacacagctgctgttcaatacaatgtcttagaaaaagacgatgaccctgcatcacttacaatatgggtgcccatgttccaatcatctatgccagcagatttacttataaaagaactagctaatgtcaacatactagtgaaacaaatatccacacccaagggaccttcactaagagtcatgataaactcaagaagtgcagtgctagcacaaatgcccagcaaatttaccatatgcgctaatgtgtccttggatgaaagaagcaaactagcatatgatgtaaccacaccctgtgaaatcaaggcatgtagtctaacatgcctaaaatcaaaaaatatgttgactacagttaaagatctcactatgaagacactcaaccctacacatgatattattgctttatgtgaatttgaaaacatagtaacatcaaaaaaagtcataataccaacatacctaagatccatcagtgtcagaaataaagatctgaacacacttgaaaatataacaaccactgaattcaaaaatgctatcacaaatgcaaaaatcatcccttactcaggattactattagtcatcacagtgactgacaacaaaggagcattcaaatacataaagccacaaagtcaattcatagtagatcttggagcttacctagaaaaagaaagtatatattatgttaccacaaattggaagcacacagctacacgatttgcaatcaaacccatggaagattaacctttttcctctacatcagtgtgttaattcatacaaactttctacctacattcttcacttcaccatcacaatcacaaacactctgtggttcaaccaatcaaacaaaacttatctgaagtcccagatcatcccaagtcattgtttatcagatctagtactcaaataagttaataaaaaatatacacatggacgtccatggggcaaatgcaaacatgtttgtttttcttgttttattgccactagtctctagtcagtgtgttaatcttacaaccagaactcaattaccccctgcatacactaattctttcacacgtggtgtttattaccctgacaaagttttcagatcctcagttttacattcaactcaggacttgttcttacctttcttttccaatgttacttggttccatgctatacatgtctctgggaccaatggtactaagaggtttgataaccctgtcctaccatttaatgatggtgtttattttgcttccactgagaagtctaacataataagaggctggatttttggtactactttagattcgaagacccagtccctacttattgttaataacgctactaatgttgttattaaagtctgtgaatttcaattttgtaatgatccatttttgggtgtttattaccacaaaaacaacaaaagttggatggaaagtgagttcagagtttattctagtgcgaataattgcacttttgaatatgtctctcagccttttcttatggaccttgaaggaaaacagggtaatttcaaaaatcttagggaatttgtgtttaagaatattgatggttattttaaaatatattctaagcacacgcctattaatttagtgcgtgatctccctcagggtttttcggctttagaaccattggtagatttgccaataggtattaacatcactaggtttcaaactttacttgctttacatagaagttatttgactcctggtgattcttcttcaggttggacagctggtgctgcagcttattatgtgggttatcttcaacctaggacttttctattaaaatataatgaaaatggaaccattacagatgctgtagactgtgcacttgaccctctctcagaaacaaagtgtacgttgaaatccttcactgtagaaaaaggaatctatcaaacttctaactttagagtccaaccaacagaatctattgttagatttcctaatattacaaacttgtgcccttttggtgaagtttttaacgccaccagatttgcatctgtttatgcttggaacaggaagagaatcagcaactgtgttgctgattattctgtcctatataattccgcatcattttccacttttaagtgttatggagtgtctcctactaaattaaatgatctctgctttactaatgtctatgcagattcatttgtaattagaggtgatgaagtcagacaaatcgctccagggcaaactggaaagattgctgattataattataaattaccagatgattttacaggctgcgttatagcttggaattctaacaatcttgattctaaggttggtggtaattataattacctgtatagattgtttaggaagtctaatctcaaaccttttgagagagatatttcaactgaaatctatcaggccggtagcacaccttgtaatggtgttgaaggttttaattgttactttcctttacaatcatatggtttccaacccactaatggtgttggttaccaaccatacagagtagtagtactttcttttgaacttctacatgcaccagcaactgtttgtggacctaaaaagtctactaatttggttaaaaacaaatgtgtcaatttcaacttcaatggtttaacaggcacaggtgttcttactgagtctaacaaaaagtttctgcctttccaacaatttggcagagacattgctgacactactgatgctgtccgtgatccacagacacttgagattcttgacattacaccatgttcttttggtggtgtcagtgttataacaccaggaacaaatacttctaaccaggttgctgttctttatcaggatgttaactgcacagaagtccctgttgctattcatgcagatcaacttactcctacttggcgtgtttattctacaggttctaatgtttttcaaacacgtgcaggctgtttaataggggctgaacatgtcaacaactcatatgagtgtgacatacccattggtgcaggtatatgcgctagttatcagactcagactaattctcctcggcgggcacgtagtgtagctagtcaatccatcattgcctacactatgtcacttggtgcagaaaattcagttgcttactctaataactctattgccatacccacaaattttactattagtgttaccacagaaattctaccagtgtctatgaccaagacatcagtagattgtacaatgtacatttgtggtgattcaactgaatgcagcaatcttttgttgcaatatggcagtttttgtacacaattaaaccgtgctttaactggaatagctgttgaacaagacaaaaacacccaagaagtttttgcacaagtcaaacaaatttacaaaacaccaccaattaaagattttggtggttttaatttttcacaaatattaccagatccatcaaaaccaagcaagaggtcatttattgaagatctacttttcaacaaagtgacacttgcagatgctggcttcatcaaacaatatggtgattgccttggtgatattgctgctagagacctcatttgtgcacaaaagtttaacggccttactgttttgccacctttgctcacagatgaaatgattgctcaatacacttctgcactgttagcgggtacaatcacttctggttggacctttggtgcaggtgctgcattacaaataccatttgctatgcaaatggcttataggtttaatggtattggagttacacagaatgttctctatgagaaccaaaaattgattgccaaccaatttaatagtgctattggcaaaattcaagactcactttcttccacagcaagtgcacttggaaaacttcaagatgtggtcaaccaaaatgcacaagctttaaacacgcttgttaaacaacttagctccaattttggtgcaatttcaagtgttttaaatgatatcctttcacgtcttgacaaagttgaggctgaagtgcaaattgataggttgatcacaggcagacttcaaagtttgcagacatatgtgactcaacaattaattagagctgcagaaatcagagcttctgctaatcttgctgctactaaaatgtcagagtgtgtacttggacaatcaaaaagagttgatttttgtggaaagggctatcatcttatgtccttccctcagtcagcacctcatggtgtagtcttcttgcatgtgacttatgtccctgcacaagaaaagaacttcacaactgctcctgccatttgtcatgatggaaaagcacactttcctcgtgaaggtgtctttgtttcaaatggcacacactggtttgtaacacaaaggaatttttatgaaccacaaatcattactacagacaacacatttgtgtctggtaactgtgatgttgtaataggaattgtcaacaacacagtttatgatcctttgcaacctgaattagactcattcaaggaggagttagataaatattttaagaatcatacatcaccagatgttgatttaggtgacatctctggcattaatgcttcagttgtaaacattcaaaaagaaattgaccgcctcaatgaggttgccaagaatttaaatgaatctctcatcgatctccaagaacttggaaagtatgagcagtatataaaatggccatggtacatttggctaggttttatagctggcttgattgccatagtaatggtgacaattatgctttgctgtatgaccagttgctgtagttgtctcaagggactgctcctatactgtaaggccagaagcacaccaatcacactaagcaaggatcaactgagtggtataaataatattgcatttagtaactaaataaaaatagcacctaatcatgttcttacaatggtttactatctgctcatagacaacccatctatcattggattttcttaaaatctgaacttcatcgaaactcttatctataaaccatctcacttacactatttaagtagattcctagtttatagttatataaaacacaattgaatgccagtcgaccttaccatctgtaaaaatgaaaactggggcaaatatgtcacgaaggaatccttgcaaatttgaaattcgaggtcattgcttaaatggtaagaggtgtcattttagtcataattattttgaatggccaccccatgcactgcttgtaagacaaaactttatgttaaacagaatacttaagtctatggataaaagtatagataccttatcagaaataagtggagctgcagagttggacagaacagaagagtatgctcttggtgtagttggagtgctagagagttatataggatcaataaacaatataactaaacaatcagcatgtgttgccatgagcaaactcctcactgaactcaatagtgatgatatcaaaaagctgagggacaatgaagagctaaattcacccaagataagagtgtacaatactgtcatatcatatattgaaagcaacaggaaaaacaataaacaaactatccatctgttaaaaagattgccagcagacgtattgaagaaaaccatcaaaaacacattggatatccataagagcataaccatcaacaacccaaaagaatcaactgttagtgatacaaatgaccatgccaaaaataatgatactacctgacaaatatccttgtagtataacttccatactaataacaagtagatgtagagttactatgtataatcaaaagaacacactatatttcaatcaaaacaacccaaataaccatatgtactcaccgaatcaaacattcaatgaaatccattggacctctcaagaattgattgacacaattcaaaattttctacaacatctaggtattattgaggatatatatacaatatatatattagtgtcataacactcaattctaacactcaccacatcgttacattattaattcaaacaattcaagttgtgggacaaaatggatcccattattaatggaaattctgctaatgtttatctaaccgatagttatttaaaaggtgttatctctttctcagagtgtaatgctttaggaagttacatattcaatggtccttatctcaaaaatgattataccaacttaattagtagacaaaatccattaatagaacacatgaatctaaagaaactaaatataacacagtccttaatatctaagtatcataaaggtgaaataaaattagaagaacctacttattttcagtcattacttatgacatacaagagtatgacctcgtcagaacagattgctaccactaatttacttaaaaagataataagaagagctatagaaataagtgatgtcaaagtctatgctatattgaataaactagggcttaaagaaaaggacaagattaaatccaacaatggacaagatgaagacaactcagttattacgaccataatcaaagatgatatactttcagctgttaaagataatcaatctcatcttaaagcagacaaaaatcactctacaaaacaaaaagacacaatcaaaacaacactcttgaagaaattgatgtgttcaatgcaacatcctccatcatggttaatacattggtttaacttatacacaaaattaaacaacatattaacacagtatcgatcaaatgaggtaaaaaaccatgggtttacattgatagataatcaaactcttagtggatttcaatttattttgaaccaatatggttgtatagtttatcataaggaactcaaaagaattactgtgacaacctataatcaattcttgacatggaaagatattagccttagtagattaaatgtttgtttaattacatggattagtaactgcttgaacacattaaataaaagcttaggcttaagatgcggattcaataatgttatcttgacacaactattcctttatggagattgtatactaaagctatttcacaatgaggggttctacataataaaagaggtagagggatttattatgtctctaattttaaatataacagaagaagatcaattcagaaaacgattttataatagtatgctcaacaacatcacagatgctgctaataaagctcagaaaaatctgctatcaagagtatgtcatacattattagataagacagtgtccgataatataataaatggcagatggataattctattaagtaagttccttaaattaattaagcttgcaggtgacaataaccttaacaatctgagtgaactatattttttgttcagaatatttggacacccaatggtagatgaaagacaagccatggatgctgttaaaattaattgcaatgagaccaaattttacttgttaagcagtctgagtatgttaagaggtgcctttatatatagaattataaaagggtttgtaaataattacaacagatggcctactttaagaaatgctattgttttacccttaagatggttaacttactataaactaaacacttatccttctttgttggaacttacagaaagagatttgattgtgttatcaggactacgtttctatcgtgagtttcggttgcctaaaaaagtggatcttgaaatgattataaatgataaagctatatcacctcctaaaaatttgatatggactagtttccctagaaattacatgccatcacacatacaaaactatatagaacatgaaaaattaaaattttccgagagtgataaatcaagaagagtattagagtattatttaagagataacaaattcaatgaatgtgatttatacaactgtgtagttaatcaaagttatctcaacaaccctaatcatgtggtatcattgacaggcaaagaaagagaactcagtgtaggtagaatgtttgcaatgcaaccgggaatgttcagacaggttcaaatattggcagagaaaatgatagctgaaaacattttacaattctttcctgaaagtcttacaagatatggtgatctagaactacaaaaaatattagaattgaaagcaggaataagtaacaaatcaaatcgctacaatgataattacaacaattacattagtaagtgctctatcatcacagatctcagcaaattcaatcaagcatttcgatatgaaacgtcatgtatttgtagtgatgtgctggatgaactgcatggtgtacaatctctattttcctggttacatttaactattcctcatgtcacaataatatgcacatataggcatgcacccccctatataggagatcatattgtagatcttaacaatgtagatgaacaaagtggattatatagatatcacatgggtggcatcgaagggtggtgtcaaaaactgtggaccatagaagctatatcactattggatctaatatctctcaaagggaaattctcaattactgctttaattaatggtgacaatcaatcaatagatataagcaaaccaatcagactcatggaaggtcaaactcatgctcaagcagattatttgctagcattaaatagccttaaattactgtataaagagtatgcaggcataggccacaaattaaaaggaactgagacttatatatcacgagatatgcaatttatgagtaaaacaattcaacataacggtgtatattacccagctagtataaagaaagtcctaagagtgggaccgtggataaacactatacttgatgatttcaaagtgagtctagaatctataggtagtttgacacaagaattagaatatagaggtgaaagtctattatgcagtttaatatttagaaatgtatggttatataatcagattgctctacaattaaaaaatcatgcattatgtaacaataaactatatttggacatattaaaggttctgaaacacttaaaaaccttttttaatcttgataatattgatacagcattaacattgtatatgaatttacccatgttatttggtggtggtgatcccaacttgttatatcgaagtttctatagaagaactcctgacttcctcacagaggctatagttcactctgtgttcatacttagttattatacaaaccatgacttaaaagataaacttcaagatctgtcagatgatagattgaataagttcttaacatgcataatcacgtttgacaaaaaccctaatgctgaattcgtaacattgatgagagatcctcaagctttagggtctgagagacaagctaaaattactagcgaaatcaatagactggcagttacagaggttttgagtacagctccaaacaaaatattctccaaaagtgcacaacattatactactacagagatagatctaaatgatattatgcaaaatatagaacctacatatcctcatgggctaagagttgtttatgaaagtttacccttttataaagcagagaaaatagtaaatcttatatcaggtacaaaatctataactaacatactggaaaaaacttctgccatagacttaacagatattgatagagccactgagatgatgaggaaaaacataactttgcttataaggatacttccattggattgtaacagagataaaagagagatattgagtatggaaaacctaagtattactgaattaagcaaatatgttagggaaagatcttggtctttatccaatatagttggtgttacatcacccagtatcatgtatacaatggacatcaaatatactacaagcactatatctagtggcataattatagagaaatataatgttaacagtttaacacgtggtgagagaggacccactaaaccatgggttggttcatctacacaagagaaaaaaacaatgccagtttataatagacaagtcttaaccaaaaaacagagagatcaaatagatctattagcaaaattggattgggtgtatgcatctatagataacaaggatgaattcatggaagaactcagcataggaacccttgggttaacatatgaaaaggccaagaaattatttccacaatatttaagtgtcaattatttgcatcgccttacagtcagtagtagaccatgtgaattccctgcatcaataccagcttatagaacaacaaattatcactttgacactagccctattaatcgcatattaacagaaaagtatggtgatgaagatattgacatagtattccaaaactgtataagctttggccttagtttaatgtcagtagtagaacaatttactaatgtatgtcctaacagaattattctcatacctaagcttaatgagatacatttgatgaaacctcccatattcacaggtgatgttgatattcacaagttaaaacaagtgatacaaaaacagcatatgtttttaccagacaaaataagtttgactcaatatgtggaattattcttaagtaataaaacactcaaatctggatctcatgttaattctaatttaatattggcacataaaatatctgactattttcataatacttacattttaagtactaatttagctggacattggattctgattatacaacttatgaaagattctaaaggtatttttgaaaaagattggggagagggatatataactgatcatatgtttattaatttgaaagttttcttcaatgcttataagacctatctcttgtgttttcataaaggttatggcaaagcaaagctggagtgtgatatgaacacttcagatcttctatgtgtattggaattaatagacagtagttattggaagtctatgtctaaggtatttttagaacaaaaagttatcaaatacattcttagccaagatgcaagtttacatagagtaaaaggatgtcatagcttcaaattatggtttcttaaacgtcttaatgtagcagaattcacagtttgcccttgggttgttaacatagattatcatccaacacatatgaaagcaatattaacttatatagatcttgttagaatgggattgataaatatagatagaatacacattaaaaataaacacaaattcaatgatgaattttatacttctaatctcttctacattaattataacttctcagataatactcatctattaactaaacatataaggattgctaattctgaattagaaaataattacaacaaattatatcatcctacaccagaaaccctagagaatatactagccaatccgattaaaagtaatgacaaaaagacactgaatgactattgtataggtaaaaatgttgactcaataatgttaccattgttatctaataagaagcttattaaatcgtctgcaatgattagaaccaattacagcaaacaagatttgtataatttattccctatggttgtgattgatagaattatagatcattcaggcaatacagccaaatccaaccaactttacactactacttcccaccaaatatctttagtgcacaatagcacatcactttactgcatgcttccttggcatcatattaatagattcaattttgtatttagttctacaggttgtaaaattagtatagagtatattttaaaagatcttaaaattaaagatcccaattgtatagcattcataggtgaaggagcagggaatttattattgcgtacagtagtggaacttcatcctgacataagatatatttacagaagtctgaaagattgcaatgatcatagtttacctattgagtttttaaggctgtacaatggacatatcaacattgattatggtgaaaatttgaccattcctgctacagatgcaaccaacaacattcattggtcttatttacatataaagtttgctgaacctatcagtctttttgtctgtgatgccgaattgtctgtaacagtcaactggagtaaaattataatagaatggagcaagcatgtaagaaagtgcaagtactgttcctcagttaataaatgtatgttaatagtaaaatatcatgctcaagatgatattgatttcaaattagacaatataactatattaaaaacttatgtatgcttaggcagtaagttaaagggatcggaggtttacttagtccttacaataggtcctgcgaatatattcccagtatttaatgtagtacaaaatgctaaattgatactatcaagaaccaaaaatttcatcatgcctaagaaagctgataaagagtctattgatgcaaatattaaaagtttgataccctttctttgttaccctataacaaaaaaaggaattaatactgcattgtcaaaactaaagagtgttgttagtggagatatactatcatattctatagctggacgtaatgaagttttcagcaataaacttataaatcataagcatatgaacatcttaaaatggttcaatcatgttttaaatttcagatcaacagaactaaactataaccatttatatatggtagaatctacatatccttacctaagtgaattgttaaacagcttgacaaccaatgaacttaaaaaactgattaaaatcacaggtagtctgttatacaactttcataatgaataatgaataaagatcttataataaaaattcccatagctatacactaacactgtattcaattatagttattaaaaattaaaaatcgtacgattttttaaataacttttagtgaactaatcctaaagttatcattttaatcttggaggaataaatttaaaccctaatctaattggtttatatgtgtattaactaaattacgagatattagtttttgacactttttttctcgtgggtcggcatggcatctccacctcctcgcggtccgacctgggcatccgaaggaggacgcacgtccactcggatggctaagggagctgctaacaaagcccgaaaggaagctgagttggctgctgccaccgctgagcaataactagcataaccccttggggcctctaaacgggtcttgaggggttttttgctgaaaggaggaactatatacgcgtaagcttctcgacccattctcatgtttgacagcttatcatcgaatttctgccattcatccgcttattatcacttattcaggcgtagcaaccaggcgtttaagggcaccaataactgccttaaaaaaattacgccccgccctgccactcatcgcagtactgttgtaattcattaagcattctgccgacatggaagccatcacagacggcatgatgaacctgaatcgccagcggcatcagcaccttgtcgccttgcgtataatatttgcccatggtgaaaacgggggcgaagaagttgtccatattggccacgtttaaatcaaaactggtgaaactcacccagggattggctgagacgaaaaacatattctcaataaaccctttagggaaataggccaggttttcaccgtaacacgccacatcttgcgaatatatgtgtagaaactgccggaaatcgtcgtggtattcactccagagcgatgaaaacgtttcagtttgctcatggaaaacggtgtaacaagggtgaacactatcccatatcaccagctcaccgtctttcattgccatacggaattccggatgagcattcatcaggcgggcaagaatgtgaataaaggccggataaaacttgtgcttatttttctttacggtctttaaaaaggccgtaatatccagctgaacggtctggttataggtacattgagcaactgactgaaatgcctcaaaatgttctttacgatgccattgggatatatcaacggtggtatatccagtgatttttttctccattttagcttccttagctcctgaaaatctcgataactcaaaaaatacgcccggtagtgatcttatttcattatggtgaaagttggaacctcttacgtgccgatcaacgtctcattttcgccaaaagttggcccagggcttcccggtatcaacagggacaccaggatttatttattctgcgaagtgatcttccgtcacaggtatttattcgcgataagctcatggagcggcgtaaccgtcgcacaggaaggacagagaaagcgcggatctgggaagtgacggacagaacggtcaggacctggattggggaggcggttgccgccgctgctgctgacggtgtgacgttctctgttccggtcacaccacatacgttccgccattcctatgcgatgcacatgctgtatgccggtataccgctgaaagttctgcaaagcctgatgggacataagtccatcagttcaacggaagtctacacgaaggtttttgcgctggatgtggctgcccggcaccgggtgcagtttgcgatgccggagtctgatgcggttgcgatgctgaaacaattatcctgagaataaatgccttggcctttatatggaaatgtggaactgagtggatatgctgtttttgtctgttaaacagagaagctggctgttatccactgagaagcgaacgaaacagtcgggaaaatctcccattatcgtagagatccgcattattaatctcaggagcctgtgtagcgtttataggaagtagtgttctgtcatgatgcctgcaagcggtaacgaaaacgatttgaatatgccttcaggaacaatagaaatcttcgtgcggtgttacgttgaagtggagcggattatgtcagcaatggacagaacaacctaatgaacacagaaccatgatgtggtctgtccttttacagccagtaggctcgccgcagtcgagcgacggcgaagccctcgagtgagcgaggaagcaccagggaacagcacttatatattctgcttacacacgatgcctgaaaaaacttcccttggggttatccacttatccacggggatatttttataattattttttttatagtttttagatcttcttttttagagcgccttgtaggcctttatccatgctggttctagagaaggtgttgtgacaaattgccctttcagtgtgacaaatcaccctcaaatgacagtcctgtctgtgacaaattgcccttaaccctgtgacaaattgccctcagaagaagctgttttttcacaaagttatccctgcttattgactcttttttatttagtgtgacaatctaaaaacttgtcacacttcacatggatctgtcatggcggaaacagcggttatcaatcacaagaaacgtaaaaatagcccgcgaatcgtccagtcaaacgacctcactgaggcggcatatagtctctcccgggatcaaaaacgtatgctgtatctgttcgttgaccagatcagaaaatctgatggcaccctacaggaacatgacggtatctgcgagatccatgttgctaaatatgctgaaatattcggattgacctctgcggaagccagtaaggatatacggcaggcattgaagagtttcgcggggaaggaagtggttttttatcgccctgaagaggatgccggcgatgaaaaaggctatgaatcttttccttggtttatcaaacgtgcgcacagtccatccagagggctttacagtgtacatatcaacccatatctcattcccttctttatcgggttacagaaccggtttacgcagtttcggcttagtgaaacaaaagaaatcaccaatccgtatgccatgcgtttatacgaatccctgtgtcagtatcgtaagccggatggctcaggcatcgtctctctgaaaatcgactggatcatagagcgttaccagctgcctcaaagttaccagcgtatgcctgacttccgccgccgcttcctgcaggtctgtgttaatgagatcaacagcagaactccaatgcgcctctcatacattgagaaaaagaaaggccgccagacgactcatatcgtattttccttccgcgatatcacttccatgacgacaggatagtctgagggttatctgtcacagatttgagggtggttcgtcacatttgttctgacctactgagggtaatttgtcacagttttgctgtttccttcagcctgcatggattttctcatactttttgaactgtaatttttaaggaagccaaatttgagggcagtttgtcacagttgatttccttctctttcccttcgtcatgtgacctgatatcgggggttagttcgtcatcattgatgagggttgattatcacagtttattactctgaattggctatccgcgtgtgtacctctacctggagtttttcccacggtggatatttcttcttgcgctgagcgtaagagctatctgacagaacagttcttctttgcttcctcgccagttcgctcgctatgctcggttacacggctgcggcgagcgctagtgataataagtgactgaggtatgtgctcttcttatctccttttgtagtgttgctcttattttaaacaactttgcggttttttgatgactttgcgattttgttgttgctttgcagtaaattgcaagatttaataaaaaaacgcaaagcaatgattaaaggatgttcagaatgaaactcatggaaacacttaaccagtgcataaacgctggtcatgaaatgacgaaggctatcgccattgcacagtttaatgatgacagcccggaagcgaggaaaataacccggcgctggagaataggtgaagcagcggatttagttggggtttcttctcaggctatcagagatgccgagaaagcagggcgactaccgcacccggatatggaaattcgaggacgggttgagcaacgtgttggttatacaattgaacaaattaatcatatgcgtgatgtgtttggtacgcgattgcgacgtgctgaagacgtatttccaccggtgatcggggttgctgcccataaaggtggcgtttacaaaacctcagtttctgttcatcttgctcaggatctggctctgaaggggctacgtgttttgctcgtggaaggtaacgacccccagggaacagcctcaatgtatcacggatgggtaccagatcttcatattcatgcagaagacactctcctgcctttctatcttggggaaaaggacgatgtcacttatgcaataaagcccacttgctggccggggcttgacattattccttcctgtctggctctgcaccgtattgaaactgagttaatgggcaaatttgatgaaggtaaactgcccaccgatccacacctgatgctccgactggccattgaaactgttgctcatgactatgatgtcatagttattgacagcgcgcctaacctgggtatcggcacgattaatgtcgtatgtgctgctgatgtgctgattgttcccacgcctgctgagttgtttgactacacctccgcactgcagtttttcgatatgcttcgtgatctgctcaagaacgttgatcttaaagggttcgagcctgatgtacgtattttgcttaccaaatacagcaatagtaatggctctcagtccccgtggatggaggagcaaattcgggatgcctggggaagcatggttctaaaaaatgttgtacgtgaaacggatgaagttggtaaaggtcagatccggatgagaactgtttttgaacaggccattgatcaacgctcttcaactggtgcctggagaaatgctctttctatttgggaacctgtctgcaatgaaattttcgatcgtctgattaaaccacgctgggagattagataatgaagcgtgcgcctgttattccaaaacatacgctcaatactcaaccggttgaagatacttcgttatcgacaccagctgccccgatggtggattcgttaattgcgcgcgtaggagtaatggctcgcggtaatgccattactttgcctgtatgtggtcgggatgtgaagtttactcttgaagtgctccggggtgatagtgttgagaagacctctcgggtatggtcaggtaatgaacgtgaccaggagctgcttactgaggacgcactggatgatctcatcccttcttttctactgactggtcaacagacaccggcgttcggtcgaagagtatctggtgtcatagaaattgccgatgggagtcgccgtcgtaaagctgctgcacttaccgaaagtgattatcgtgttctggttggcgagctggatgatgagcagatggctgcattatccagattgggtaacgattatcgcccaacaagtgcttatgaacgtggtcagcgttatgcaagccgattgcagaatgaatttgctggaaatatttctgcgctggctgatgcggaaaatatttcacgtaagattattacccgctgtatcaacaccgccaaattgcctaaatcagttgttgctcttttttctcaccccggtgaactatctgcccggtcaggtgatgcacttcaaaaagcctttacagataaagaggaattacttaagcagcaggcatctaaccttcatgagcagaaaaaagctggggtgatatttgaagctgaagaagttatcactcttttaacttctgtgcttaaaacgtcatctgcatcaagaactagtttaagctcacgacatcagtttgctcctggagcgacagtattgtataagggcgataaaatggtgcttaacctggacaggtctcgtgttccaactgagtgtatagagaaaattgaggccattcttaaggaacttgaaaagccagcaccctgatgcgaccacgttttagtctacgtttatctgtctttacttaatgtcctttgttacaggccagaaagcataactggcctgaatattctctctgggcccactgttccacttgtatcgtcggtctgataatcagactgggaccacggtcccactcgtatcgtcggtctgattattagtctgggaccacggtcccactcgtatcgtcggtctgattattagtctgggaccacggtcccactcgtatcgtcggtctgataatcagactgggaccacggtcccactcgtatcgtcggtctgattattagtctgggaccatggtcccactcgtatcgtcggtctgattattagtctgggaccacggtcccactcgtatcgtcggtctgattattagtctggaaccacggtcccactcgtatcgtcggtctgattattagtctgggaccacggtcccactcgtatcgtcggtctgattattagtctgggaccacgatcccactcgtgttgtcggtctgattatcggtctgggaccacggtcccacttgtattgtcgatcagactatcagcgtgagactacgattccatcaatgcctgtcaagggcaagtattgacatgtcgtcgtaacctgtagaacggagtaacctcggtgtgcggttgtatgcctgctgtggattgctgctgtgtcctgcttatccacaacattttgcgcacggttatgtggacaaaatacctggttacccaggccgtgccggcacgttaaccgggctgcatccgatgcaagtgtgtcgctgtcgagttt

SEQ ID NO: 58 - DNA, 23386 bp, Artificial Sequence
  Description of Artificial Sequence: Synthetic polynucleotide
aaacggatccttcgaaacgaaattaatacgactcactatagggaagtttttcgcgtctgatgaggccgttaggccgaaactcctctccggagtcacgcgaaaaaatgcgtacaacaaacttgcataaaccaaaaaaatggggcaaataagaatttgataagtaccacttaaatttaactcccttgcttagcgatggtgagcgagctgattaaggagaacatgcacatgaagctgtacatggagggcaccgtgaacaaccaccacttcaagtgcacatccgagggcgaaggcaagccctacgagggcacccagaccatgagaatcaaggcggtcgagggcggccctctccccttcgccttcgacatcctggctaccagcttcatgtacggcagcaaaaccttcatcaaccacacccagggcatccccgacttctttaagcagtccttccccgagggcttcacatgggagagagtcaccacatacgaagacgggggcgtgctgaccgctacccaggacaccagcctccaggacggctgcctcatctacaacgtcaagatcagaggggtgaacttcccatccaacggccctgtgatgcagaagaaaacactcggctgggaggcctccaccgagaccctgtaccccgctgacggcggcctggaaggcagagccgacatggccctgaagctcgtgggcgggggccacctgatctgcaacttgaagaccacatacagatccaagaaacccgctaagaacctcaagatgcccggcgtctactatgtggacagaagactggaaagaatcaaggaggccgacaaagagacctacgtcgagcagcacgaggtggctgtggccagatactgcgacctccctagcaaactggggcacagatgagtattcaattatagttattaaaaacttaacagaagacaaaaatggggcaaataagaatttgataagtaccacttaaatttaactcccttgcttagcgatgggttcgaattcgctatcgatgataaaagtacgtctacaaaatctatttgataatgatgaagtagcgctactaaaaataacgtgttatacggataaactaatacatctaacgaatgcgctagcgaaagcggtaatacatacgataaaactaaatggtatagtatttgtacatgtaataacgtcgtcggatatatgtccgaataataatatagtagtaaaatcgaattttacgacgatgccggtactacaaaatggtggttatatatgggaaatgatggaactaacgcattgttcgcaaccgaatggtctactagatgataattgtgaaataaaattttcgaaaaaactatcggattcgacgatgacgaattatatgaatcaactatcggaactactaggttttgatctaaatccgtaaattataattaatatcaactagcaaatcaatgtcactaacaccattagttaatataaaacttaacagaagacaaaaatggggcaaataaatcaattcagccaacccaaccatggatacgacgcataatgataatacgccgcaacgtctaatgataacggatatgcgtccgctatcgctagaaacgataataacgtcgctaacgcgtgatataataacgcataaatttatatatctaataaatcatgaatgtatagtacgtaaactagatgaacgtcaagcgacgtttacgtttctagtaaattatgaaatgaaactactacataaagtaggttcgacgaaatataaaaaatatacggaatataatacgaaatatggtacgtttccgatgccgatatttataaatcatgatggttttctagaatgtataggtataaaaccgacgaaacatacgccgataatatataaatatgatctaaatccgtaaatttcaacacaatattcacacaatctaaaacaacaactctatgcataactatactccatagtccagatggagcctgaaaattatagtaatttaaaattaaggagagatataagatagaagatggggcaaatacaaagatggctcttagcaaagtcaagttgaatgatacactcaacaaagatcaacttctgtcatccagcaaatacaccatccaacggagcacaggagatagtattgatactcctaattatgatgtgcagaaacacatcaataagttatgtggcatgttattaatcacagaagatgctaatcataaattcactgggttaataggtatgttatatgcgatgtctaggttaggaagagaagacaccataaaaatactcagagatgcgggatatcatgtaaaagcaaatggagtagatgtaacaacacatcgtcaagacattaatggaaaagaaatgaaatttgaagtgttaacattggcaagcttaacaactgaaattcaaatcaacattgagatagaatctagaaaatcctacaaaaaaatgctaaaagaaatgggagaggtagctccagaatacaggcatgactctcctgattgtgggatgataatattatgtatagcagcattagtaataactaaattagcagcaggggacagatctggtcttacagccgtgattaggagagctaataatgtcctaaaaaatgaaatgaaacgttacaaaggcttactacccaaggacatagccaacagcttctatgaagtgtttgaaaaacatccccactttatagatgtttttgttcattttggtatagcacaatcttctaccagaggtggcagtagagttgaagggatttttgcaggattgtttatgaatgcctatggtgcagggcaagtgatgttacggtggggagtcttagcaaaatcagttaaaaatattatgttaggacatgctagtgtgcaagcagaaatggaacaagttgttgaggtttatgaatatgcccaaaaattgggtggtgaagcaggattctaccatatattgaacaacccaaaagcatcattattatctttgactcaatttcctcacttctccagtgtagtattaggcaatgctgctggcctaggcataatgggagagtacagaggtacaccgaggaatcaagatctatatgatgcagcaaaggcatatgctgaacaactcaaagaaaatggtgtgattaactacagtgtactagacttgacagcagaagaactagaggctatcaaacatcagcttaatccaaaagataatgatgtagagctttgagttaataaaaaatggggcaaataaatcatcatggaaaagtttgctcctgaattccatggagaagatgcaaacaacagggctactaaattcctagaatcaataaagggcaaattcacatcacccaaagatcccaagaaaaaagatagtatcatatctgtcaactcaatagatatagaagtaaccaaagaaagccctataacatcaaattcaactattatcaacccaacaaatgagacagatgatactgcagggaacaagcccaattatcaaagaaaacctctagtaagtttcaaagaagaccctacaccaagtgataatcccttttctaaactatacaaagaaaccatagaaacatttgataacaatgaagaagaatccagctattcatacgaagaaataaatgatcagacaaacgataatataacagcaagattagataggattgatgaaaaattaagtgaaatactaggaatgcttcacacattagtagtggcaagtgcaggacctacatctgctcgggatggtataagagatgccatgattggtttaagagaagaaatgatagaaaaaatcagaactgaagcattaatgaccaatgacagattagaagctatggcaagactcaggaatgaggaaagtgaaaagatggcaaaagacacatcagatgaagtgtctctcaatccaacatcagagaaattgaacaacctattggaagggaatgatagtgacaatgatctatcacttgaagatttctgattagttaccactcttcacatcaacacacaataccaacagaagaccaacaaactaaccaacccaatcatccaaccaaacatccatccgccaatcagccaaacagccaacaaaacaaccagccaatccaaaactaaccacccggaaaaaatctataatatagttacaaaaaaaggaaagggtggggcaaatatggaaacatacgtgaacaagcttcacgaaggctccacatacacagctgctgttcaatacaatgtcttagaaaaagacgatgaccctgcatcacttacaatatgggtgcccatgttccaatcatctatgccagcagatttacttataaaagaactagctaatgtcaacatactagtgaaacaaatatccacacccaagggaccttcactaagagtcatgataaactcaagaagtgcagtgctagcacaaatgcccagcaaatttaccatatgcgctaatgtgtccttggatgaaagaagcaaactagcatatgatgtaaccacaccctgtgaaatcaaggcatgtagtctaacatgcctaaaatcaaaaaatatgttgactacagttaaagatctcactatgaagacactcaaccctacacatgatattattgctttatgtgaatttgaaaacatagtaacatcaaaaaaagtcataataccaacatacctaagatccatcagtgtcagaaataaagatctgaacacacttgaaaatataacaaccactgaattcaaaaatgctatcacaaatgcaaaaatcatcccttactcaggattactattagtcatcacagtgactgacaacaaaggagcattcaaatacataaagccacaaagtcaattcatagtagatcttggagcttacctagaaaaagaaagtatatattatgttaccacaaattggaagcacacagctacacgatttgcaatcaaacccatggaagattaacctttttcctctacatcagtgtgttaattcatacaaactttctacctacattcttcacttcaccatcacaatcacaaacactctgtggttcaaccaatcaaacaaaacttatctgaagtcccagatcatcccaagtcattgtttatcagatctagtactcaaataagttaataaaaaatatacacatggacgtccatggggcaaatgcaaacatgtttgtttttcttgttttattgccactagtctctagtcagtgtgttaatcttacaaccagaactcaattaccccctgcatacactaattctttcacacgtggtgtttattaccctgacaaagttttcagatcctcagttttacattcaactcaggacttgttcttacctttcttttccaatgttacttggttccatgctatacatgtctctgggaccaatggtactaagaggtttgataaccctgtcctaccatttaatgatggtgtttattttgcttccactgagaagtctaacataataagaggctggatttttggtactactttagattcgaagacccagtccctacttattgttaataacgctactaatgttgttattaaagtctgtgaatttcaattttgtaatgatccatttttgggtgtttattaccacaaaaacaacaaaagttggatggaaagtgagttcagagtttattctagtgcgaataattgcacttttgaatatgtctctcagccttttcttatggaccttgaaggaaaacagggtaatttcaaaaatcttagggaatttgtgtttaagaatattgatggttattttaaaatatattctaagcacacgcctattaatttagtgcgtgatctccctcagggtttttcggctttagaaccattggtagatttgccaataggtattaacatcactaggtttcaaactttacttgctttacatagaagttatttgactcctggtgattcttcttcaggttggacagctggtgctgcagcttattatgtgggttatcttcaacctaggacttttctattaaaatataatgaaaatggaaccattacagatgctgtagactgtgcacttgaccctctctcagaaacaaagtgtacgttgaaatccttcactgtagaaaaaggaatctatcaaacttctaactttagagtccaaccaacagaatctattgttagatttcctaatattacaaacttgtgcccttttggtgaagtttttaacgccaccagatttgcatctgtttatgcttggaacaggaagagaatcagcaactgtgttgctgattattctgtcctatataattccgcatcattttccacttttaagtgttatggagtgtctcctactaaattaaatgatctctgctttactaatgtctatgcagattcatttgtaattagaggtgatgaagtcagacaaatcgctccagggcaaactggaaagattgctgattataattataaattaccagatgattttacaggctgcgttatagcttggaattctaacaatcttgattctaaggttggtggtaattataattacctgtatagattgtttaggaagtctaatctcaaaccttttgagagagatatttcaactgaaatctatcaggccggtagcacaccttgtaatggtgttgaaggttttaattgttactttcctttacaatcatatggtttccaacccactaatggtgttggttaccaaccatacagagtagtagtactttcttttgaacttctacatgcaccagcaactgtttgtggacctaaaaagtctactaatttggttaaaaacaaatgtgtcaatttcaacttcaatggtttaacaggcacaggtgttcttactgagtctaacaaaaagtttctgcctttccaacaatttggcagagacattgctgacactactgatgctgtccgtgatccacagacacttgagattcttgacattacaccatgttcttttggtggtgtcagtgttataacaccaggaacaaatacttctaaccaggttgctgttctttatcaggatgttaactgcacagaagtccctgttgctattcatgcagatcaacttactcctacttggcgtgtttattctacaggttctaatgtttttcaaacacgtgcaggctgtttaataggggctgaacatgtcaacaactcatatgagtgtgacatacccattggtgcaggtatatgcgctagttatcagactcagactaattctcctcggcgggcacgtagtgtagctagtcaatccatcattgcctacactatgtcacttggtgcagaaaattcagttgcttactctaataactctattgccatacccacaaattttactattagtgttaccacagaaattctaccagtgtctatgaccaagacatcagtagattgtacaatgtacatttgtggtgattcaactgaatgcagcaatcttttgttgcaatatggcagtttttgtacacaattaaaccgtgctttaactggaatagctgttgaacaagacaaaaacacccaagaagtttttgcacaagtcaaacaaatttacaaaacaccaccaattaaagattttggtggttttaatttttcacaaatattaccagatccatcaaaaccaagcaagaggtcatttattgaagatctacttttcaacaaagtgacacttgcagatgctggcttcatcaaacaatatggtgattgccttggtgatattgctgctagagacctcatttgtgcacaaaagtttaacggccttactgttttgccacctttgctcacagatgaaatgattgctcaatacacttctgcactgttagcgggtacaatcacttctggttggacctttggtgcaggtgctgcattacaaataccatttgctatgcaaatggcttataggtttaatggtattggagttacacagaatgttctctatgagaaccaaaaattgattgccaaccaatttaatagtgctattggcaaaattcaagactcactttcttccacagcaagtgcacttggaaaacttcaagatgtggtcaaccaaaatgcacaagctttaaacacgcttgttaaacaacttagctccaattttggtgcaatttcaagtgttttaaatgatatcctttcacgtcttgacaaagttgaggctgaagtgcaaattgataggttgatcacaggcagacttcaaagtttgcagacatatgtgactcaacaattaattagagctgcagaaatcagagcttctgctaatcttgctgctactaaaatgtcagagtgtgtacttggacaatcaaaaagagttgatttttgtggaaagggctatcatcttatgtccttccctcagtcagcacctcatggtgtagtcttcttgcatgtgacttatgtccctgcacaagaaaagaacttcacaactgctcctgccatttgtcatgatggaaaagcacactttcctcgtgaaggtgtctttgtttcaaatggcacacactggtttgtaacacaaaggaatttttatgaaccacaaatcattactacagacaacacatttgtgtctggtaactgtgatgttgtaataggaattgtcaacaacacagtttatgatcctttgcaacctgaattagactcattcaaggaggagttagataaatattttaagaatcatacatcaccagatgttgatttaggtgacatctctggcattaatgcttcagttgtaaacattcaaaaagaaattgaccgcctcaatgaggttgccaagaatttaaatgaatctctcatcgatctccaagaacttggaaagtatgagcagtatataaaatggccatggtacatttggctaggttttatagctggcttgattgccatagtaatggtgacaattatgctttgctgtatgaccagttgctgtagttgtctcaaggccagaagcacaccaatcacactaagcaaggatcaactgagtggtataaataatattgcatttagtaactaaataaaaatagcacctaatcatgttcttacaatggtttactatctgctcatagacaacccatctatcattggattttcttaaaatctgaacttcatcgaaactcttatctataaaccatctcacttacactatttaagtagattcctagtttatagttatataaaacacaattgaatgccagtcgaccttaccatctgtaaaaatgaaaactggggcaaatatgtcacgaaggaatccttgcaaatttgaaattcgaggtcattgcttaaatggtaagaggtgtcattttagtcataattattttgaatggccaccccatgcactgcttgtaagacaaaactttatgttaaacagaatacttaagtctatggataaaagtatagataccttatcagaaataagtggagctgcagagttggacagaacagaagagtatgctcttggtgtagttggagtgctagagagttatataggatcaataaacaatataactaaacaatcagcatgtgttgccatgagcaaactcctcactgaactcaatagtgatgatatcaaaaagctgagggacaatgaagagctaaattcacccaagataagagtgtacaatactgtcatatcatatattgaaagcaacaggaaaaacaataaacaaactatccatctgttaaaaagattgccagcagacgtattgaagaaaaccatcaaaaacacattggatatccataagagcataaccatcaacaacccaaaagaatcaactgttagtgatacaaatgaccatgccaaaaataatgatactacctgacaaatatccttgtagtataacttccatactaataacaagtagatgtagagttactatgtataatcaaaagaacacactatatttcaatcaaaacaacccaaataaccatatgtactcaccgaatcaaacattcaatgaaatccattggacctctcaagaattgattgacacaattcaaaattttctacaacatctaggtattattgaggatatatatacaatatatatattagtgtcataacactcaattctaacactcaccacatcgttacattattaattcaaacaattcaagttgtgggacaaaatggatcccattattaatggaaattctgctaatgtttatctaaccgatagttatttaaaaggtgttatctctttctcagagtgtaatgctttaggaagttacatattcaatggtccttatctcaaaaatgattataccaacttaattagtagacaaaatccattaatagaacacatgaatctaaagaaactaaatataacacagtccttaatatctaagtatcataaaggtgaaataaaattagaagaacctacttattttcagtcattacttatgacatacaagagtatgacctcgtcagaacagattgctaccactaatttacttaaaaagataataagaagagctatagaaataagtgatgtcaaagtctatgctatattgaataaactagggcttaaagaaaaggacaagattaaatccaacaatggacaagatgaagacaactcagttattacgaccataatcaaagatgatatactttcagctgttaaagataatcaatctcatcttaaagcagacaaaaatcactctacaaaacaaaaagacacaatcaaaacaacactcttgaagaaattgatgtgttcaatgcaacatcctccatcatggttaatacattggtttaacttatacacaaaattaaacaacatattaacacagtatcgatcaaatgaggtaaaaaaccatgggtttacattgatagataatcaaactcttagtggatttcaatttattttgaaccaatatggttgtatagtttatcataaggaactcaaaagaattactgtgacaacctataatcaattcttgacatggaaagatattagccttagtagattaaatgtttgtttaattacatggattagtaactgcttgaacacattaaataaaagcttaggcttaagatgcggattcaataatgttatcttgacacaactattcctttatggagattgtatactaaagctatttcacaatgaggggttctacataataaaagaggtagagggatttattatgtctctaattttaaatataacagaagaagatcaattcagaaaacgattttataatagtatgctcaacaacatcacagatgctgctaataaagctcagaaaaatctgctatcaagagtatgtcatacattattagataagacagtgtccgataatataataaatggcagatggataattctattaagtaagttccttaaattaattaagcttgcaggtgacaataaccttaacaatctgagtgaactatattttttgttcagaatatttggacacccaatggtagatgaaagacaagccatggatgctgttaaaattaattgcaatgagaccaaattttacttgttaagcagtctgagtatgttaagaggtgcctttatatatagaattataaaagggtttgtaaataattacaacagatggcctactttaagaaatgctattgttttacccttaagatggttaacttactataaactaaacacttatccttctttgttggaacttacagaaagagatttgattgtgttatcaggactacgtttctatcgtgagtttcggttgcctaaaaaagtggatcttgaaatgattataaatgataaagctatatcacctcctaaaaatttgatatggactagtttccctagaaattacatgccatcacacatacaaaactatatagaacatgaaaaattaaaattttccgagagtgataaatcaagaagagtattagagtattatttaagagataacaaattcaatgaatgtgatttatacaactgtgtagttaatcaaagttatctcaacaaccctaatcatgtggtatcattgacaggcaaagaaagagaactcagtgtaggtagaatgtttgcaatgcaaccgggaatgttcagacaggttcaaatattggcagagaaaatgatagctgaaaacattttacaattctttcctgaaagtcttacaagatatggtgatctagaactacaaaaaatattagaattgaaagcaggaataagtaacaaatcaaatcgctacaatgataattacaacaattacattagtaagtgctctatcatcacagatctcagcaaattcaatcaagcatttcgatatgaaacgtcatgtatttgtagtgatgtgctggatgaactgcatggtgtacaatctctattttcctggttacatttaactattcctcatgtcacaataatatgcacatataggcatgcacccccctatataggagatcatattgtagatcttaacaatgtagatgaacaaagtggattatatagatatcacatgggtggcatcgaagggtggtgtcaaaaactgtggaccatagaagctatatcactattggatctaatatctctcaaagggaaattctcaattactgctttaattaatggtgacaatcaatcaatagatataagcaaaccaatcagactcatggaaggtcaaactcatgctcaagcagattatttgctagcattaaatagccttaaattactgtataaagagtatgcaggcataggccacaaattaaaaggaactgagacttatatatcacgagatatgcaatttatgagtaaaacaattcaacataacggtgtatattacccagctagtataaagaaagtcctaagagtgggaccgtggataaacactatacttgatgatttcaaagtgagtctagaatctataggtagtttgacacaagaattagaatatagaggtgaaagtctattatgcagtttaatatttagaaatgtatggttatataatcagattgctctacaattaaaaaatcatgcattatgtaacaataaactatatttggacatattaaaggttctgaaacacttaaaaaccttttttaatcttgataatattgatacagcattaacattgtatatgaatttacccatgttatttggtggtggtgatcccaacttgttatatcgaagtttctatagaagaactcctgacttcctcacagaggctatagttcactctgtgttcatacttagttattatacaaaccatgacttaaaagataaacttcaagatctgtcagatgatagattgaataagttcttaacatgcataatcacgtttgacaaaaaccctaatgctgaattcgtaacattgatgagagatcctcaagctttagggtctgagagacaagctaaaattactagcgaaatcaatagactggcagttacagaggttttgagtacagctccaaacaaaatattctccaaaagtgcacaacattatactactacagagatagatctaaatgatattatgcaaaatatagaacctacatatcctcatgggctaagagttgtttatgaaagtttacccttttataaagcagagaaaatagtaaatcttatatcaggtacaaaatctataactaacatactggaaaaaacttctgccatagacttaacagatattgatagagccactgagatgatgaggaaaaacataactttgcttataaggatacttccattggattgtaacagagataaaagagagatattgagtatggaaaacctaagtattactgaattaagcaaatatgttagggaaagatcttggtctttatccaatatagttggtgttacatcacccagtatcatgtatacaatggacatcaaatatactacaagcactatatctagtggcataattatagagaaatataatgttaacagtttaacacgtggtgagagaggacccactaaaccatgggttggttcatctacacaagagaaaaaaacaatgccagtttataatagacaagtcttaaccaaaaaacagagagatcaaatagatctattagcaaaattggattgggtgtatgcatctatagataacaaggatgaattcatggaagaactcagcataggaacccttgggttaacatatgaaaaggccaagaaattatttccacaatatttaagtgtcaattatttgcatcgccttacagtcagtagtagaccatgtgaattccctgcatcaataccagcttatagaacaacaaattatcactttgacactagccctattaatcgcatattaacagaaaagtatggtgatgaagatattgacatagtattccaaaactgtataagctttggccttagtttaatgtcagtagtagaacaatttactaatgtatgtcctaacagaattattctcatacctaagcttaatgagatacatttgatgaaacctcccatattcacaggtgatgttgatattcacaagttaaaacaagtgatacaaaaacagcatatgtttttaccagacaaaataagtttgactcaatatgtggaattattcttaagtaataaaacactcaaatctggatctcatgttaattctaatttaatattggcacataaaatatctgactattttcataatacttacattttaagtactaatttagctggacattggattctgattatacaacttatgaaagattctaaaggtatttttgaaaaagattggggagagggatatataactgatcatatgtttattaatttgaaagttttcttcaatgcttataagacctatctcttgtgttttcataaaggttatggcaaagcaaagctggagtgtgatatgaacacttcagatcttctatgtgtattggaattaatagacagtagttattggaagtctatgtctaaggtatttttagaacaaaaagttatcaaatacattcttagccaagatgcaagtttacatagagtaaaaggatgtcatagcttcaaattatggtttcttaaacgtcttaatgtagcagaattcacagtttgcccttgggttgttaacatagattatcatccaacacatatgaaagcaatattaacttatatagatcttgttagaatgggattgataaatatagatagaatacacattaaaaataaacacaaattcaatgatgaattttatacttctaatctcttctacattaattataacttctcagataatactcatctattaactaaacatataaggattgctaattctgaattagaaaataattacaacaaattatatcatcctacaccagaaaccctagagaatatactagccaatccgattaaaagtaatgacaaaaagacactgaatgactattgtataggtaaaaatgttgactcaataatgttaccattgttatctaataagaagcttattaaatcgtctgcaatgattagaaccaattacagcaaacaagatttgtataatttattccctatggttgtgattgatagaattatagatcattcaggcaatacagccaaatccaaccaactttacactactacttcccaccaaatatctttagtgcacaatagcacatcactttactgcatgcttccttggcatcatattaatagattcaattttgtatttagttctacaggttgtaaaattagtatagagtatattttaaaagatcttaaaattaaagatcccaattgtatagcattcataggtgaaggagcagggaatttattattgcgtacagtagtggaacttcatcctgacataagatatatttacagaagtctgaaagattgcaatgatcatagtttacctattgagtttttaaggctgtacaatggacatatcaacattgattatggtgaaaatttgaccattcctgctacagatgcaaccaacaacattcattggtcttatttacatataaagtttgctgaacctatcagtctttttgtctgtgatgccgaattgtctgtaacagtcaactggagtaaaattataatagaatggagcaagcatgtaagaaagtgcaagtactgttcctcagttaataaatgtatgttaatagtaaaatatcatgctcaagatgatattgatttcaaattagacaatataactatattaaaaacttatgtatgcttaggcagtaagttaaagggatcggaggtttacttagtccttacaataggtcctgcgaatatattcccagtatttaatgtagtacaaaatgctaaattgatactatcaagaaccaaaaatttcatcatgcctaagaaagctgataaagagtctattgatgcaaatattaaaagtttgataccctttctttgttaccctataacaaaaaaaggaattaatactgcattgtcaaaactaaagagtgttgttagtggagatatactatcatattctatagctggacgtaatgaagttttcagcaataaacttataaatcataagcatatgaacatcttaaaatggttcaatcatgttttaaatttcagatcaacagaactaaactataaccatttatatatggtagaatctacatatccttacctaagtgaattgttaaacagcttgacaaccaatgaacttaaaaaactgattaaaatcacaggtagtctgttatacaactttcataatgaataatgaataaagatcttataataaaaattcccatagctatacactaacactgtattcaattatagttattaaaaattaaaaatcgtacgattttttaaataacttttagtgaactaatcctaaagttatcattttaatcttggaggaataaatttaaaccctaatctaattggtttatatgtgtattaactaaattacgagatattagtttttgacactttttttctcgtgggtcggcatggcatctccacctcctcgcggtccgacctgggcatccgaaggaggacgcacgtccactcggatggctaagggagctgctaacaaagcccgaaaggaagctgagttggctgctgccaccgctgagcaataactagcataaccccttggggcctctaaacgggtcttgaggggttttttgctgaaaggaggaactatatacgcgtaagcttctcgacccattctcatgtttgacagcttatcatcgaatttctgccattcatccgcttattatcacttattcaggcgtagcaaccaggcgtttaagggcaccaataactgccttaaaaaaattacgccccgccctgccactcatcgcagtactgttgtaattcattaagcattctgccgacatggaagccatcacagacggcatgatgaacctgaatcgccagcggcatcagcaccttgtcgccttgcgtataatatttgcccatggtgaaaacgggggcgaagaagttgtccatattggccacgtttaaatcaaaactggtgaaactcacccagggattggctgagacgaaaaacatattctcaataaaccctttagggaaataggccaggttttcaccgtaacacgccacatcttgcgaatatatgtgtagaaactgccggaaatcgtcgtggtattcactccagagcgatgaaaacgtttcagtttgctcatggaaaacggtgtaacaagggtgaacactatcccatatcaccagctcaccgtctttcattgccatacggaattccggatgagcattcatcaggcgggcaagaatgtgaataaaggccggataaaacttgtgcttatttttctttacggtctttaaaaaggccgtaatatccagctgaacggtctggttataggtacattgagcaactgactgaaatgcctcaaaatgttctttacgatgccattgggatatatcaacggtggtatatccagtgatttttttctccattttagcttccttagctcctgaaaatctcgataactcaaaaaatacgcccggtagtgatcttatttcattatggtgaaagttggaacctcttacgtgccgatcaacgtctcattttcgccaaaagttggcccagggcttcccggtatcaacagggacaccaggatttatttattctgcgaagtgatcttccgtcacaggtatttattcgcgataagctcatggagcggcgtaaccgtcgcacaggaaggacagagaaagcgcggatctgggaagtgacggacagaacggtcaggacctggattggggaggcggttgccgccgctgctgctgacggtgtgacgttctctgttccggtcacaccacatacgttccgccattcctatgcgatgcacatgctgtatgccggtataccgctgaaagttctgcaaagcctgatgggacataagtccatcagttcaacggaagtctacacgaaggtttttgcgctggatgtggctgcccggcaccgggtgcagtttgcgatgccggagtctgatgcggttgcgatgctgaaacaattatcctgagaataaatgccttggcctttatatggaaatgtggaactgagtggatatgctgtttttgtctgttaaacagagaagctggctgttatccactgagaagcgaacgaaacagtcgggaaaatctcccattatcgtagagatccgcattattaatctcaggagcctgtgtagcgtttataggaagtagtgttctgtcatgatgcctgcaagcggtaacgaaaacgatttgaatatgccttcaggaacaatagaaatcttcgtgcggtgttacgttgaagtggagcggattatgtcagcaatggacagaacaacctaatgaacacagaaccatgatgtggtctgtccttttacagccagtaggctcgccgcagtcgagcgacggcgaagccctcgagtgagcgaggaagcaccagggaacagcacttatatattctgcttacacacgatgcctgaaaaaacttcccttggggttatccacttatccacggggatatttttataattattttttttatagtttttagatcttcttttttagagcgccttgtaggcctttatccatgctggttctagagaaggtgttgtgacaaattgccctttcagtgtgacaaatcaccctcaaatgacagtcctgtctgtgacaaattgcccttaaccctgtgacaaattgccctcagaagaagctgttttttcacaaagttatccctgcttattgactcttttttatttagtgtgacaatctaaaaacttgtcacacttcacatggatctgtcatggcggaaacagcggttatcaatcacaagaaacgtaaaaatagcccgcgaatcgtccagtcaaacgacctcactgaggcggcatatagtctctcccgggatcaaaaacgtatgctgtatctgttcgttgaccagatcagaaaatctgatggcaccctacaggaacatgacggtatctgcgagatccatgttgctaaatatgctgaaatattcggattgacctctgcggaagccagtaaggatatacggcaggcattgaagagtttcgcggggaaggaagtggttttttatcgccctgaagaggatgccggcgatgaaaaaggctatgaatcttttccttggtttatcaaacgtgcgcacagtccatccagagggctttacagtgtacatatcaacccatatctcattcccttctttatcgggttacagaaccggtttacgcagtttcggcttagtgaaacaaaagaaatcaccaatccgtatgccatgcgtttatacgaatccctgtgtcagtatcgtaagccggatggctcaggcatcgtctctctgaaaatcgactggatcatagagcgttaccagctgcctcaaagttaccagcgtatgcctgacttccgccgccgcttcctgcaggtctgtgttaatgagatcaacagcagaactccaatgcgcctctcatacattgagaaaaagaaaggccgccagacgactcatatcgtattttccttccgcgatatcacttccatgacgacaggatagtctgagggttatctgtcacagatttgagggtggttcgtcacatttgttctgacctactgagggtaatttgtcacagttttgctgtttccttcagcctgcatggattttctcatactttttgaactgtaatttttaaggaagccaaatttgagggcagtttgtcacagttgatttccttctctttcccttcgtcatgtgacctgatatcgggggttagttcgtcatcattgatgagggttgattatcacagtttattactctgaattggctatccgcgtgtgtacctctacctggagtttttcccacggtggatatttcttcttgcgctgagcgtaagagctatctgacagaacagttcttctttgcttcctcgccagttcgctcgctatgctcggttacacggctgcggcgagcgctagtgataataagtgactgaggtatgtgctcttcttatctccttttgtagtgttgctcttattttaaacaactttgcggttttttgatgactttgcgattttgttgttgctttgcagtaaattgcaagatttaataaaaaaacgcaaagcaatgattaaaggatgttcagaatgaaactcatggaaacacttaaccagtgcataaacgctggtcatgaaatgacgaaggctatcgccattgcacagtttaatgatgacagcccggaagcgaggaaaataacccggcgctggagaataggtgaagcagcggatttagttggggtttcttctcaggctatcagagatgccgagaaagcagggcgactaccgcacccggatatggaaattcgaggacgggttgagcaacgtgttggttatacaattgaacaaattaatcatatgcgtgatgtgtttggtacgcgattgcgacgtgctgaagacgtatttccaccggtgatcggggttgctgcccataaaggtggcgtttacaaaacctcagtttctgttcatcttgctcaggatctggctctgaaggggctacgtgttttgctcgtggaaggtaacgacccccagggaacagcctcaatgtatcacggatgggtaccagatcttcatattcatgcagaagacactctcctgcctttctatcttggggaaaaggacgatgtcacttatgcaataaagcccacttgctggccggggcttgacattattccttcctgtctggctctgcaccgtattgaaactgagttaatgggcaaatttgatgaaggtaaactgcccaccgatccacacctgatgctccgactggccattgaaactgttgctcatgactatgatgtcatagttattgacagcgcgcctaacctgggtatcggcacgattaatgtcgtatgtgctgctgatgtgctgattgttcccacgcctgctgagttgtttgactacacctccgcactgcagtttttcgatatgcttcgtgatctgctcaagaacgttgatcttaaagggttcgagcctgatgtacgtattttgcttaccaaatacagcaatagtaatggctctcagtccccgtggatggaggagcaaattcgggatgcctggggaagcatggttctaaaaaatgttgtacgtgaaacggatgaagttggtaaaggtcagatccggatgagaactgtttttgaacaggccattgatcaacgctcttcaactggtgcctggagaaatgctctttctatttgggaacctgtctgcaatgaaattttcgatcgtctgattaaaccacgctgggagattagataatgaagcgtgcgcctgttattccaaaacatacgctcaatactcaaccggttgaagatacttcgttatcgacaccagctgccccgatggtggattcgttaattgcgcgcgtaggagtaatggctcgcggtaatgccattactttgcctgtatgtggtcgggatgtgaagtttactcttgaagtgctccggggtgatagtgttgagaagacctctcgggtatggtcaggtaatgaacgtgaccaggagctgcttactgaggacgcactggatgatctcatcccttcttttctactgactggtcaacagacaccggcgttcggtcgaagagtatctggtgtcatagaaattgccgatgggagtcgccgtcgtaaagctgctgcacttaccgaaagtgattatcgtgttctggttggcgagctggatgatgagcagatggctgcattatccagattgggtaacgattatcgcccaacaagtgcttatgaacgtggtcagcgttatgcaagccgattgcagaatgaatttgctggaaatatttctgcgctggctgatgcggaaaatatttcacgtaagattattacccgctgtatcaacaccgccaaattgcctaaatcagttgttgctcttttttctcaccccggtgaactatctgcccggtcaggtgatgcacttcaaaaagcctttacagataaagaggaattacttaagcagcaggcatctaaccttcatgagcagaaaaaagctggggtgatatttgaagctgaagaagttatcactcttttaacttctgtgcttaaaacgtcatctgcatcaagaactagtttaagctcacgacatcagtttgctcctggagcgacagtattgtataagggcgataaaatggtgcttaacctggacaggtctcgtgttccaactgagtgtatagagaaaattgaggccattcttaaggaacttgaaaagccagcaccctgatgcgaccacgttttagtctacgtttatctgtctttacttaatgtcctttgttacaggccagaaagcataactggcctgaatattctctctgggcccactgttccacttgtatcgtcggtctgataatcagactgggaccacggtcccactcgtatcgtcggtctgattattagtctgggaccacggtcccactcgtatcgtcggtctgattattagtctgggaccacggtcccactcgtatcgtcggtctgataatcagactgggaccacggtcccactcgtatcgtcggtctgattattagtctgggaccatggtcccactcgtatcgtcggtctgattattagtctgggaccacggtcccactcgtatcgtcggtctgattattagtctggaaccacggtcccactcgtatcgtcggtctgattattagtctgggaccacggtcccactcgtatcgtcggtctgattattagtctgggaccacgatcccactcgtgttgtcggtctgattatcggtctgggaccacggtcccacttgtattgtcgatcagactatcagcgtgagactacgattccatcaatgcctgtcaagggcaagtattgacatgtcgtcgtaacctgtagaacggagtaacctcggtgtgcggttgtatgcctgctgtggattgctgctgtgtcctgcttatccacaacattttgcgcacggttatgtggacaaaatacctggttacccaggccgtgccggcacgttaaccgggctgcatccgatgcaagtgtgtcgctgtcgagttt

SEQ ID NO: 59 - DNA, 23395 bp, Artificial Sequence
  Description of Artificial Sequence: Synthetic polynucleotide
aaacggatccttcgaaacgaaattaatacgactcactatagggaagtttttcgcgtctgatgaggccgttaggccgaaactcctctccggagtcacgcgaaaaaatgcgtacaacaaacttgcataaaccaaaaaaatggggcaaataagaatttgataagtaccacttaaatttaactcccttgcttagcgatggtgagcgagctgattaaggagaacatgcacatgaagctgtacatggagggcaccgtgaacaaccaccacttcaagtgcacatccgagggcgaaggcaagccctacgagggcacccagaccatgagaatcaaggcggtcgagggcggccctctccccttcgccttcgacatcctggctaccagcttcatgtacggcagcaaaaccttcatcaaccacacccagggcatccccgacttctttaagcagtccttccccgagggcttcacatgggagagagtcaccacatacgaagacgggggcgtgctgaccgctacccaggacaccagcctccaggacggctgcctcatctacaacgtcaagatcagaggggtgaacttcccatccaacggccctgtgatgcagaagaaaacactcggctgggaggcctccaccgagaccctgtaccccgctgacggcggcctggaaggcagagccgacatggccctgaagctcgtgggcgggggccacctgatctgcaacttgaagaccacatacagatccaagaaacccgctaagaacctcaagatgcccggcgtctactatgtggacagaagactggaaagaatcaaggaggccgacaaagagacctacgtcgagcagcacgaggtggctgtggccagatactgcgacctccctagcaaactggggcacagatgagtattcaattatagttattaaaaacttaacagaagacaaaaatggggcaaataagaatttgataagtaccacttaaatttaactcccttgcttagcgatgggttcgaattcgctatcgatgataaaagtacgtctacaaaatctatttgataatgatgaagtagcgctactaaaaataacgtgttatacggataaactaatacatctaacgaatgcgctagcgaaagcggtaatacatacgataaaactaaatggtatagtatttgtacatgtaataacgtcgtcggatatatgtccgaataataatatagtagtaaaatcgaattttacgacgatgccggtactacaaaatggtggttatatatgggaaatgatggaactaacgcattgttcgcaaccgaatggtctactagatgataattgtgaaataaaattttcgaaaaaactatcggattcgacgatgacgaattatatgaatcaactatcggaactactaggttttgatctaaatccgtaaattataattaatatcaactagcaaatcaatgtcactaacaccattagttaatataaaacttaacagaagacaaaaatggggcaaataaatcaattcagccaacccaaccatggatacgacgcataatgataatacgccgcaacgtctaatgataacggatatgcgtccgctatcgctagaaacgataataacgtcgctaacgcgtgatataataacgcataaatttatatatctaataaatcatgaatgtatagtacgtaaactagatgaacgtcaagcgacgtttacgtttctagtaaattatgaaatgaaactactacataaagtaggttcgacgaaatataaaaaatatacggaatataatacgaaatatggtacgtttccgatgccgatatttataaatcatgatggttttctagaatgtataggtataaaaccgacgaaacatacgccgataatatataaatatgatctaaatccgtaaatttcaacacaatattcacacaatctaaaacaacaactctatgcataactatactccatagtccagatggagcctgaaaattatagtaatttaaaattaaggagagatataagatagaagatggggcaaatacaaagatggctcttagcaaagtcaagttgaatgatacactcaacaaagatcaacttctgtcatccagcaaatacaccatccaacggagcacaggagatagtattgatactcctaattatgatgtgcagaaacacatcaataagttatgtggcatgttattaatcacagaagatgctaatcataaattcactgggttaataggtatgttatatgcgatgtctaggttaggaagagaagacaccataaaaatactcagagatgcgggatatcatgtaaaagcaaatggagtagatgtaacaacacatcgtcaagacattaatggaaaagaaatgaaatttgaagtgttaacattggcaagcttaacaactgaaattcaaatcaacattgagatagaatctagaaaatcctacaaaaaaatgctaaaagaaatgggagaggtagctccagaatacaggcatgactctcctgattgtgggatgataatattatgtatagcagcattagtaataactaaattagcagcaggggacagatctggtcttacagccgtgattaggagagctaataatgtcctaaaaaatgaaatgaaacgttacaaaggcttactacccaaggacatagccaacagcttctatgaagtgtttgaaaaacatccccactttatagatgtttttgttcattttggtatagcacaatcttctaccagaggtggcagtagagttgaagggatttttgcaggattgtttatgaatgcctatggtgcagggcaagtgatgttacggtggggagtcttagcaaaatcagttaaaaatattatgttaggacatgctagtgtgcaagcagaaatggaacaagttgttgaggtttatgaatatgcccaaaaattgggtggtgaagcaggattctaccatatattgaacaacccaaaagcatcattattatctttgactcaatttcctcacttctccagtgtagtattaggcaatgctgctggcctaggcataatgggagagtacagaggtacaccgaggaatcaagatctatatgatgcagcaaaggcatatgctgaacaactcaaagaaaatggtgtgattaactacagtgtactagacttgacagcagaagaactagaggctatcaaacatcagcttaatccaaaagataatgatgtagagctttgagttaataaaaaatggggcaaataaatcatcatggaaaagtttgctcctgaattccatggagaagatgcaaacaacagggctactaaattcctagaatcaataaagggcaaattcacatcacccaaagatcccaagaaaaaagatagtatcatatctgtcaactcaatagatatagaagtaaccaaagaaagccctataacatcaaattcaactattatcaacccaacaaatgagacagatgatactgcagggaacaagcccaattatcaaagaaaacctctagtaagtttcaaagaagaccctacaccaagtgataatcccttttctaaactatacaaagaaaccatagaaacatttgataacaatgaagaagaatccagctattcatacgaagaaataaatgatcagacaaacgataatataacagcaagattagataggattgatgaaaaattaagtgaaatactaggaatgcttcacacattagtagtggcaagtgcaggacctacatctgctcgggatggtataagagatgccatgattggtttaagagaagaaatgatagaaaaaatcagaactgaagcattaatgaccaatgacagattagaagctatggcaagactcaggaatgaggaaagtgaaaagatggcaaaagacacatcagatgaagtgtctctcaatccaacatcagagaaattgaacaacctattggaagggaatgatagtgacaatgatctatcacttgaagatttctgattagttaccactcttcacatcaacacacaataccaacagaagaccaacaaactaaccaacccaatcatccaaccaaacatccatccgccaatcagccaaacagccaacaaaacaaccagccaatccaaaactaaccacccggaaaaaatctataatatagttacaaaaaaaggaaagggtggggcaaatatggaaacatacgtgaacaagcttcacgaaggctccacatacacagctgctgttcaatacaatgtcttagaaaaagacgatgaccctgcatcacttacaatatgggtgcccatgttccaatcatctatgccagcagatttacttataaaagaactagctaatgtcaacatactagtgaaacaaatatccacacccaagggaccttcactaagagtcatgataaactcaagaagtgcagtgctagcacaaatgcccagcaaatttaccatatgcgctaatgtgtccttggatgaaagaagcaaactagcatatgatgtaaccacaccctgtgaaatcaaggcatgtagtctaacatgcctaaaatcaaaaaatatgttgactacagttaaagatctcactatgaagacactcaaccctacacatgatattattgctttatgtgaatttgaaaacatagtaacatcaaaaaaagtcataataccaacatacctaagatccatcagtgtcagaaataaagatctgaacacacttgaaaatataacaaccactgaattcaaaaatgctatcacaaatgcaaaaatcatcccttactcaggattactattagtcatcacagtgactgacaacaaaggagcattcaaatacataaagccacaaagtcaattcatagtagatcttggagcttacctagaaaaagaaagtatatattatgttaccacaaattggaagcacacagctacacgatttgcaatcaaacccatggaagattaacctttttcctctacatcagtgtgttaattcatacaaactttctacctacattcttcacttcaccatcacaatcacaaacactctgtggttcaaccaatcaaacaaaacttatctgaagtcccagatcatcccaagtcattgtttatcagatctagtactcaaataagttaataaaaaatatacacatggacgtccatggggcaaatgcaaacatgtttgtttttcttgttttattgccactagtctctagtcagtgtgttaatcttacaaccagaactcaattaccccctgcatacactaattctttcacacgtggtgtttattaccctgacaaagttttcagatcctcagttttacattcaactcaggacttgttcttacctttcttttccaatgttacttggttccatgctatacatgtctctgggaccaatggtactaagaggtttgataaccctgtcctaccatttaatgatggtgtttattttgcttccactgagaagtctaacataataagaggctggatttttggtactactttagattcgaagacccagtccctacttattgttaataacgctactaatgttgttattaaagtctgtgaatttcaattttgtaatgatccatttttgggtgtttattaccacaaaaacaacaaaagttggatggaaagtgagttcagagtttattctagtgcgaataattgcacttttgaatatgtctctcagccttttcttatggaccttgaaggaaaacagggtaatttcaaaaatcttagggaatttgtgtttaagaatattgatggttattttaaaatatattctaagcacacgcctattaatttagtgcgtgatctccctcagggtttttcggctttagaaccattggtagatttgccaataggtattaacatcactaggtttcaaactttacttgctttacatagaagttatttgactcctggtgattcttcttcaggttggacagctggtgctgcagcttattatgtgggttatcttcaacctaggacttttctattaaaatataatgaaaatggaaccattacagatgctgtagactgtgcacttgaccctctctcagaaacaaagtgtacgttgaaatccttcactgtagaaaaaggaatctatcaaacttctaactttagagtccaaccaacagaatctattgttagatttcctaatattacaaacttgtgcccttttggtgaagtttttaacgccaccagatttgcatctgtttatgcttggaacaggaagagaatcagcaactgtgttgctgattattctgtcctatataattccgcatcattttccacttttaagtgttatggagtgtctcctactaaattaaatgatctctgctttactaatgtctatgcagattcatttgtaattagaggtgatgaagtcagacaaatcgctccagggcaaactggaaagattgctgattataattataaattaccagatgattttacaggctgcgttatagcttggaattctaacaatcttgattctaaggttggtggtaattataattacctgtatagattgtttaggaagtctaatctcaaaccttttgagagagatatttcaactgaaatctatcaggccggtagcacaccttgtaatggtgttgaaggttttaattgttactttcctttacaatcatatggtttccaacccactaatggtgttggttaccaaccatacagagtagtagtactttcttttgaacttctacatgcaccagcaactgtttgtggacctaaaaagtctactaatttggttaaaaacaaatgtgtcaatttcaacttcaatggtttaacaggcacaggtgttcttactgagtctaacaaaaagtttctgcctttccaacaatttggcagagacattgctgacactactgatgctgtccgtgatccacagacacttgagattcttgacattacaccatgttcttttggtggtgtcagtgttataacaccaggaacaaatacttctaaccaggttgctgttctttatcaggatgttaactgcacagaagtccctgttgctattcatgcagatcaacttactcctacttggcgtgtttattctacaggttctaatgtttttcaaacacgtgcaggctgtttaataggggctgaacatgtcaacaactcatatgagtgtgacatacccattggtgcaggtatatgcgctagttatcagactcagactaattctcctcggcgggcacgtagtgtagctagtcaatccatcattgcctacactatgtcacttggtgcagaaaattcagttgcttactctaataactctattgccatacccacaaattttactattagtgttaccacagaaattctaccagtgtctatgaccaagacatcagtagattgtacaatgtacatttgtggtgattcaactgaatgcagcaatcttttgttgcaatatggcagtttttgtacacaattaaaccgtgctttaactggaatagctgttgaacaagacaaaaacacccaagaagtttttgcacaagtcaaacaaatttacaaaacaccaccaattaaagattttggtggttttaatttttcacaaatattaccagatccatcaaaaccaagcaagaggtcatttattgaagatctacttttcaacaaagtgacacttgcagatgctggcttcatcaaacaatatggtgattgccttggtgatattgctgctagagacctcatttgtgcacaaaagtttaacggccttactgttttgccacctttgctcacagatgaaatgattgctcaatacacttctgcactgttagcgggtacaatcacttctggttggacctttggtgcaggtgctgcattacaaataccatttgctatgcaaatggcttataggtttaatggtattggagttacacagaatgttctctatgagaaccaaaaattgattgccaaccaatttaatagtgctattggcaaaattcaagactcactttcttccacagcaagtgcacttggaaaacttcaagatgtggtcaaccaaaatgcacaagctttaaacacgcttgttaaacaacttagctccaattttggtgcaatttcaagtgttttaaatgatatcctttcacgtcttgacaaagttgaggctgaagtgcaaattgataggttgatcacaggcagacttcaaagtttgcagacatatgtgactcaacaattaattagagctgcagaaatcagagcttctgctaatcttgctgctactaaaatgtcagagtgtgtacttggacaatcaaaaagagttgatttttgtggaaagggctatcatcttatgtccttccctcagtcagcacctcatggtgtagtcttcttgcatgtgacttatgtccctgcacaagaaaagaacttcacaactgctcctgccatttgtcatgatggaaaagcacactttcctcgtgaaggtgtctttgtttcaaatggcacacactggtttgtaacacaaaggaatttttatgaaccacaaatcattactacagacaacacatttgtgtctggtaactgtgatgttgtaataggaattgtcaacaacacagtttatgatcctttgcaacctgaattagactcattcaaggaggagttagataaatattttaagaatcatacatcaccagatgttgatttaggtgacatctctggcattaatgcttcagttgtaaacattcaaaaagaaattgaccgcctcaatgaggttgccaagaatttaaatgaatctctcatcgatctccaagaacttggaaagtatgagcagtatataaaatggccatggtacatttggctaggttttatagctggcttgattgccatagtaatggtgacaattatgctttgctgtatgaccagttgctgtagttgtctcaagtactgtaaggccagaagcacaccaatcacactaagcaaggatcaactgagtggtataaataatattgcatttagtaactaaataaaaatagcacctaatcatgttcttacaatggtttactatctgctcatagacaacccatctatcattggattttcttaaaatctgaacttcatcgaaactcttatctataaaccatctcacttacactatttaagtagattcctagtttatagttatataaaacacaattgaatgccagtcgaccttaccatctgtaaaaatgaaaactggggcaaatatgtcacgaaggaatccttgcaaatttgaaattcgaggtcattgcttaaatggtaagaggtgtcattttagtcataattattttgaatggccaccccatgcactgcttgtaagacaaaactttatgttaaacagaatacttaagtctatggataaaagtatagataccttatcagaaataagtggagctgcagagttggacagaacagaagagtatgctcttggtgtagttggagtgctagagagttatataggatcaataaacaatataactaaacaatcagcatgtgttgccatgagcaaactcctcactgaactcaatagtgatgatatcaaaaagctgagggacaatgaagagctaaattcacccaagataagagtgtacaatactgtcatatcatatattgaaagcaacaggaaaaacaataaacaaactatccatctgttaaaaagattgccagcagacgtattgaagaaaaccatcaaaaacacattggatatccataagagcataaccatcaacaacccaaaagaatcaactgttagtgatacaaatgaccatgccaaaaataatgatactacctgacaaatatccttgtagtataacttccatactaataacaagtagatgtagagttactatgtataatcaaaagaacacactatatttcaatcaaaacaacccaaataaccatatgtactcaccgaatcaaacattcaatgaaatccattggacctctcaagaattgattgacacaattcaaaattttctacaacatctaggtattattgaggatatatatacaatatatatattagtgtcataacactcaattctaacactcaccacatcgttacattattaattcaaacaattcaagttgtgggacaaaatggatcccattattaatggaaattctgctaatgtttatctaaccgatagttatttaaaaggtgttatctctttctcagagtgtaatgctttaggaagttacatattcaatggtccttatctcaaaaatgattataccaacttaattagtagacaaaatccattaatagaacacatgaatctaaagaaactaaatataacacagtccttaatatctaagtatcataaaggtgaaataaaattagaagaacctacttattttcagtcattacttatgacatacaagagtatgacctcgtcagaacagattgctaccactaatttacttaaaaagataataagaagagctatagaaataagtgatgtcaaagtctatgctatattgaataaactagggcttaaagaaaaggacaagattaaatccaacaatggacaagatgaagacaactcagttattacgaccataatcaaagatgatatactttcagctgttaaagataatcaatctcatcttaaagcagacaaaaatcactctacaaaacaaaaagacacaatcaaaacaacactcttgaagaaattgatgtgttcaatgcaacatcctccatcatggttaatacattggtttaacttatacacaaaattaaacaacatattaacacagtatcgatcaaatgaggtaaaaaaccatgggtttacattgatagataatcaaactcttagtggatttcaatttattttgaaccaatatggttgtatagtttatcataaggaactcaaaagaattactgtgacaacctataatcaattcttgacatggaaagatattagccttagtagattaaatgtttgtttaattacatggattagtaactgcttgaacacattaaataaaagcttaggcttaagatgcggattcaataatgttatcttgacacaactattcctttatggagattgtatactaaagctatttcacaatgaggggttctacataataaaagaggtagagggatttattatgtctctaattttaaatataacagaagaagatcaattcagaaaacgattttataatagtatgctcaacaacatcacagatgctgctaataaagctcagaaaaatctgctatcaagagtatgtcatacattattagataagacagtgtccgataatataataaatggcagatggataattctattaagtaagttccttaaattaattaagcttgcaggtgacaataaccttaacaatctgagtgaactatattttttgttcagaatatttggacacccaatggtagatgaaagacaagccatggatgctgttaaaattaattgcaatgagaccaaattttacttgttaagcagtctgagtatgttaagaggtgcctttatatatagaattataaaagggtttgtaaataattacaacagatggcctactttaagaaatgctattgttttacccttaagatggttaacttactataaactaaacacttatccttctttgttggaacttacagaaagagatttgattgtgttatcaggactacgtttctatcgtgagtttcggttgcctaaaaaagtggatcttgaaatgattataaatgataaagctatatcacctcctaaaaatttgatatggactagtttccctagaaattacatgccatcacacatacaaaactatatagaacatgaaaaattaaaattttccgagagtgataaatcaagaagagtattagagtattatttaagagataacaaattcaatgaatgtgatttatacaactgtgtagttaatcaaagttatctcaacaaccctaatcatgtggtatcattgacaggcaaagaaagagaactcagtgtaggtagaatgtttgcaatgcaaccgggaatgttcagacaggttcaaatattggcagagaaaatgatagctgaaaacattttacaattctttcctgaaagtcttacaagatatggtgatctagaactacaaaaaatattagaattgaaagcaggaataagtaacaaatcaaatcgctacaatgataattacaacaattacattagtaagtgctctatcatcacagatctcagcaaattcaatcaagcatttcgatatgaaacgtcatgtatttgtagtgatgtgctggatgaactgcatggtgtacaatctctattttcctggttacatttaactattcctcatgtcacaataatatgcacatataggcatgcacccccctatataggagatcatattgtagatcttaacaatgtagatgaacaaagtggattatatagatatcacatgggtggcatcgaagggtggtgtcaaaaactgtggaccatagaagctatatcactattggatctaatatctctcaaagggaaattctcaattactgctttaattaatggtgacaatcaatcaatagatataagcaaaccaatcagactcatggaaggtcaaactcatgctcaagcagattatttgctagcattaaatagccttaaattactgtataaagagtatgcaggcataggccacaaattaaaaggaactgagacttatatatcacgagatatgcaatttatgagtaaaacaattcaacataacggtgtatattacccagctagtataaagaaagtcctaagagtgggaccgtggataaacactatacttgatgatttcaaagtgagtctagaatctataggtagtttgacacaagaattagaatatagaggtgaaagtctattatgcagtttaatatttagaaatgtatggttatataatcagattgctctacaattaaaaaatcatgcattatgtaacaataaactatatttggacatattaaaggttctgaaacacttaaaaaccttttttaatcttgataatattgatacagcattaacattgtatatgaatttacccatgttatttggtggtggtgatcccaacttgttatatcgaagtttctatagaagaactcctgacttcctcacagaggctatagttcactctgtgttcatacttagttattatacaaaccatgacttaaaagataaacttcaagatctgtcagatgatagattgaataagttcttaacatgcataatcacgtttgacaaaaaccctaatgctgaattcgtaacattgatgagagatcctcaagctttagggtctgagagacaagctaaaattactagcgaaatcaatagactggcagttacagaggttttgagtacagctccaaacaaaatattctccaaaagtgcacaacattatactactacagagatagatctaaatgatattatgcaaaatatagaacctacatatcctcatgggctaagagttgtttatgaaagtttacccttttataaagcagagaaaatagtaaatcttatatcaggtacaaaatctataactaacatactggaaaaaacttctgccatagacttaacagatattgatagagccactgagatgatgaggaaaaacataactttgcttataaggatacttccattggattgtaacagagataaaagagagatattgagtatggaaaacctaagtattactgaattaagcaaatatgttagggaaagatcttggtctttatccaatatagttggtgttacatcacccagtatcatgtatacaatggacatcaaatatactacaagcactatatctagtggcataattatagagaaatataatgttaacagtttaacacgtggtgagagaggacccactaaaccatgggttggttcatctacacaagagaaaaaaacaatgccagtttataatagacaagtcttaaccaaaaaacagagagatcaaatagatctattagcaaaattggattgggtgtatgcatctatagataacaaggatgaattcatggaagaactcagcataggaacccttgggttaacatatgaaaaggccaagaaattatttccacaatatttaagtgtcaattatttgcatcgccttacagtcagtagtagaccatgtgaattccctgcatcaataccagcttatagaacaacaaattatcactttgacactagccctattaatcgcatattaacagaaaagtatggtgatgaagatattgacatagtattccaaaactgtataagctttggccttagtttaatgtcagtagtagaacaatttactaatgtatgtcctaacagaattattctcatacctaagcttaatgagatacatttgatgaaacctcccatattcacaggtgatgttgatattcacaagttaaaacaagtgatacaaaaacagcatatgtttttaccagacaaaataagtttgactcaatatgtggaattattcttaagtaataaaacactcaaatctggatctcatgttaattctaatttaatattggcacataaaatatctgactattttcataatacttacattttaagtactaatttagctggacattggattctgattatacaacttatgaaagattctaaaggtatttttgaaaaagattggggagagggatatataactgatcatatgtttattaatttgaaagttttcttcaatgcttataagacctatctcttgtgttttcataaaggttatggcaaagcaaagctggagtgtgatatgaacacttcagatcttctatgtgtattggaattaatagacagtagttattggaagtctatgtctaaggtatttttagaacaaaaagttatcaaatacattcttagccaagatgcaagtttacatagagtaaaaggatgtcatagcttcaaattatggtttcttaaacgtcttaatgtagcagaattcacagtttgcccttgggttgttaacatagattatcatccaacacatatgaaagcaatattaacttatatagatcttgttagaatgggattgataaatatagatagaatacacattaaaaataaacacaaattcaatgatgaattttatacttctaatctcttctacattaattataacttctcagataatactcatctattaactaaacatataaggattgctaattctgaattagaaaataattacaacaaattatatcatcctacaccagaaaccctagagaatatactagccaatccgattaaaagtaatgacaaaaagacactgaatgactattgtataggtaaaaatgttgactcaataatgttaccattgttatctaataagaagcttattaaatcgtctgcaatgattagaaccaattacagcaaacaagatttgtataatttattccctatggttgtgattgatagaattatagatcattcaggcaatacagccaaatccaaccaactttacactactacttcccaccaaatatctttagtgcacaatagcacatcactttactgcatgcttccttggcatcatattaatagattcaattttgtatttagttctacaggttgtaaaattagtatagagtatattttaaaagatcttaaaattaaagatcccaattgtatagcattcataggtgaaggagcagggaatttattattgcgtacagtagtggaacttcatcctgacataagatatatttacagaagtctgaaagattgcaatgatcatagtttacctattgagtttttaaggctgtacaatggacatatcaacattgattatggtgaaaatttgaccattcctgctacagatgcaaccaacaacattcattggtcttatttacatataaagtttgctgaacctatcagtctttttgtctgtgatgccgaattgtctgtaacagtcaactggagtaaaattataatagaatggagcaagcatgtaagaaagtgcaagtactgttcctcagttaataaatgtatgttaatagtaaaatatcatgctcaagatgatattgatttcaaattagacaatataactatattaaaaacttatgtatgcttaggcagtaagttaaagggatcggaggtttacttagtccttacaataggtcctgcgaatatattcccagtatttaatgtagtacaaaatgctaaattgatactatcaagaaccaaaaatttcatcatgcctaagaaagctgataaagagtctattgatgcaaatattaaaagtttgataccctttctttgttaccctataacaaaaaaaggaattaatactgcattgtcaaaactaaagagtgttgttagtggagatatactatcatattctatagctggacgtaatgaagttttcagcaataaacttataaatcataagcatatgaacatcttaaaatggttcaatcatgttttaaatttcagatcaacagaactaaactataaccatttatatatggtagaatctacatatccttacctaagtgaattgttaaacagcttgacaaccaatgaacttaaaaaactgattaaaatcacaggtagtctgttatacaactttcataatgaataatgaataaagatcttataataaaaattcccatagctatacactaacactgtattcaattatagttattaaaaattaaaaatcgtacgattttttaaataacttttagtgaactaatcctaaagttatcattttaatcttggaggaataaatttaaaccctaatctaattggtttatatgtgtattaactaaattacgagatattagtttttgacactttttttctcgtgggtcggcatggcatctccacctcctcgcggtccgacctgggcatccgaaggaggacgcacgtccactcggatggctaagggagctgctaacaaagcccgaaaggaagctgagttggctgctgccaccgctgagcaataactagcataaccccttggggcctctaaacgggtcttgaggggttttttgctgaaaggaggaactatatacgcgtaagcttctcgacccattctcatgtttgacagcttatcatcgaatttctgccattcatccgcttattatcacttattcaggcgtagcaaccaggcgtttaagggcaccaataactgccttaaaaaaattacgccccgccctgccactcatcgcagtactgttgtaattcattaagcattctgccgacatggaagccatcacagacggcatgatgaacctgaatcgccagcggcatcagcaccttgtcgccttgcgtataatatttgcccatggtgaaaacgggggcgaagaagttgtccatattggccacgtttaaatcaaaactggtgaaactcacccagggattggctgagacgaaaaacatattctcaataaaccctttagggaaataggccaggttttcaccgtaacacgccacatcttgcgaatatatgtgtagaaactgccggaaatcgtcgtggtattcactccagagcgatgaaaacgtttcagtttgctcatggaaaacggtgtaacaagggtgaacactatcccatatcaccagctcaccgtctttcattgccatacggaattccggatgagcattcatcaggcgggcaagaatgtgaataaaggccggataaaacttgtgcttatttttctttacggtctttaaaaaggccgtaatatccagctgaacggtctggttataggtacattgagcaactgactgaaatgcctcaaaatgttctttacgatgccattgggatatatcaacggtggtatatccagtgatttttttctccattttagcttccttagctcctgaaaatctcgataactcaaaaaatacgcccggtagtgatcttatttcattatggtgaaagttggaacctcttacgtgccgatcaacgtctcattttcgccaaaagttggcccagggcttcccggtatcaacagggacaccaggatttatttattctgcgaagtgatcttccgtcacaggtatttattcgcgataagctcatggagcggcgtaaccgtcgcacaggaaggacagagaaagcgcggatctgggaagtgacggacagaacggtcaggacctggattggggaggcggttgccgccgctgctgctgacggtgtgacgttctctgttccggtcacaccacatacgttccgccattcctatgcgatgcacatgctgtatgccggtataccgctgaaagttctgcaaagcctgatgggacataagtccatcagttcaacggaagtctacacgaaggtttttgcgctggatgtggctgcccggcaccgggtgcagtttgcgatgccggagtctgatgcggttgcgatgctgaaacaattatcctgagaataaatgccttggcctttatatggaaatgtggaactgagtggatatgctgtttttgtctgttaaacagagaagctggctgttatccactgagaagcgaacgaaacagtcgggaaaatctcccattatcgtagagatccgcattattaatctcaggagcctgtgtagcgtttataggaagtagtgttctgtcatgatgcctgcaagcggtaacgaaaacgatttgaatatgccttcaggaacaatagaaatcttcgtgcggtgttacgttgaagtggagcggattatgtcagcaatggacagaacaacctaatgaacacagaaccatgatgtggtctgtccttttacagccagtaggctcgccgcagtcgagcgacggcgaagccctcgagtgagcgaggaagcaccagggaacagcacttatatattctgcttacacacgatgcctgaaaaaacttcccttggggttatccacttatccacggggatatttttataattattttttttatagtttttagatcttcttttttagagcgccttgtaggcctttatccatgctggttctagagaaggtgttgtgacaaattgccctttcagtgtgacaaatcaccctcaaatgacagtcctgtctgtgacaaattgcccttaaccctgtgacaaattgccctcagaagaagctgttttttcacaaagttatccctgcttattgactcttttttatttagtgtgacaatctaaaaacttgtcacacttcacatggatctgtcatggcggaaacagcggttatcaatcacaagaaacgtaaaaatagcccgcgaatcgtccagtcaaacgacctcactgaggcggcatatagtctctcccgggatcaaaaacgtatgctgtatctgttcgttgaccagatcagaaaatctgatggcaccctacaggaacatgacggtatctgcgagatccatgttgctaaatatgctgaaatattcggattgacctctgcggaagccagtaaggatatacggcaggcattgaagagtttcgcggggaaggaagtggttttttatcgccctgaagaggatgccggcgatgaaaaaggctatgaatcttttccttggtttatcaaacgtgcgcacagtccatccagagggctttacagtgtacatatcaacccatatctcattcccttctttatcgggttacagaaccggtttacgcagtttcggcttagtgaaacaaaagaaatcaccaatccgtatgccatgcgtttatacgaatccctgtgtcagtatcgtaagccggatggctcaggcatcgtctctctgaaaatcgactggatcatagagcgttaccagctgcctcaaagttaccagcgtatgcctgacttccgccgccgcttcctgcaggtctgtgttaatgagatcaacagcagaactccaatgcgcctctcatacattgagaaaaagaaaggccgccagacgactcatatcgtattttccttccgcgatatcacttccatgacgacaggatagtctgagggttatctgtcacagatttgagggtggttcgtcacatttgttctgacctactgagggtaatttgtcacagttttgctgtttccttcagcctgcatggattttctcatactttttgaactgtaatttttaaggaagccaaatttgagggcagtttgtcacagttgatttccttctctttcccttcgtcatgtgacctgatatcgggggttagttcgtcatcattgatgagggttgattatcacagtttattactctgaattggctatccgcgtgtgtacctctacctggagtttttcccacggtggatatttcttcttgcgctgagcgtaagagctatctgacagaacagttcttctttgcttcctcgccagttcgctcgctatgctcggttacacggctgcggcgagcgctagtgataataagtgactgaggtatgtgctcttcttatctccttttgtagtgttgctcttattttaaacaactttgcggttttttgatgactttgcgattttgttgttgctttgcagtaaattgcaagatttaataaaaaaacgcaaagcaatgattaaaggatgttcagaatgaaactcatggaaacacttaaccagtgcataaacgctggtcatgaaatgacgaaggctatcgccattgcacagtttaatgatgacagcccggaagcgaggaaaataacccggcgctggagaataggtgaagcagcggatttagttggggtttcttctcaggctatcagagatgccgagaaagcagggcgactaccgcacccggatatggaaattcgaggacgggttgagcaacgtgttggttatacaattgaacaaattaatcatatgcgtgatgtgtttggtacgcgattgcgacgtgctgaagacgtatttccaccggtgatcggggttgctgcccataaaggtggcgtttacaaaacctcagtttctgttcatcttgctcaggatctggctctgaaggggctacgtgttttgctcgtggaaggtaacgacccccagggaacagcctcaatgtatcacggatgggtaccagatcttcatattcatgcagaagacactctcctgcctttctatcttggggaaaaggacgatgtcacttatgcaataaagcccacttgctggccggggcttgacattattccttcctgtctggctctgcaccgtattgaaactgagttaatgggcaaatttgatgaaggtaaactgcccaccgatccacacctgatgctccgactggccattgaaactgttgctcatgactatgatgtcatagttattgacagcgcgcctaacctgggtatcggcacgattaatgtcgtatgtgctgctgatgtgctgattgttcccacgcctgctgagttgtttgactacacctccgcactgcagtttttcgatatgcttcgtgatctgctcaagaacgttgatcttaaagggttcgagcctgatgtacgtattttgcttaccaaatacagcaatagtaatggctctcagtccccgtggatggaggagcaaattcgggatgcctggggaagcatggttctaaaaaatgttgtacgtgaaacggatgaagttggtaaaggtcagatccggatgagaactgtttttgaacaggccattgatcaacgctcttcaactggtgcctggagaaatgctctttctatttgggaacctgtctgcaatgaaattttcgatcgtctgattaaaccacgctgggagattagataatgaagcgtgcgcctgttattccaaaacatacgctcaatactcaaccggttgaagatacttcgttatcgacaccagctgccccgatggtggattcgttaattgcgcgcgtaggagtaatggctcgcggtaatgccattactttgcctgtatgtggtcgggatgtgaagtttactcttgaagtgctccggggtgatagtgttgagaagacctctcgggtatggtcaggtaatgaacgtgaccaggagctgcttactgaggacgcactggatgatctcatcccttcttttctactgactggtcaacagacaccggcgttcggtcgaagagtatctggtgtcatagaaattgccgatgggagtcgccgtcgtaaagctgctgcacttaccgaaagtgattatcgtgttctggttggcgagctggatgatgagcagatggctgcattatccagattgggtaacgattatcgcccaacaagtgcttatgaacgtggtcagcgttatgcaagccgattgcagaatgaatttgctggaaatatttctgcgctggctgatgcggaaaatatttcacgtaagattattacccgctgtatcaacaccgccaaattgcctaaatcagttgttgctcttttttctcaccccggtgaactatctgcccggtcaggtgatgcacttcaaaaagcctttacagataaagaggaattacttaagcagcaggcatctaaccttcatgagcagaaaaaagctggggtgatatttgaagctgaagaagttatcactcttttaacttctgtgcttaaaacgtcatctgcatcaagaactagtttaagctcacgacatcagtttgctcctggagcgacagtattgtataagggcgataaaatggtgcttaacctggacaggtctcgtgttccaactgagtgtatagagaaaattgaggccattcttaaggaacttgaaaagccagcaccctgatgcgaccacgttttagtctacgtttatctgtctttacttaatgtcctttgttacaggccagaaagcataactggcctgaatattctctctgggcccactgttccacttgtatcgtcggtctgataatcagactgggaccacggtcccactcgtatcgtcggtctgattattagtctgggaccacggtcccactcgtatcgtcggtctgattattagtctgggaccacggtcccactcgtatcgtcggtctgataatcagactgggaccacggtcccactcgtatcgtcggtctgattattagtctgggaccatggtcccactcgtatcgtcggtctgattattagtctgggaccacggtcccactcgtatcgtcggtctgattattagtctggaaccacggtcccactcgtatcgtcggtctgattattagtctgggaccacggtcccactcgtatcgtcggtctgattattagtctgggaccacgatcccactcgtgttgtcggtctgattatcggtctgggaccacggtcccacttgtattgtcgatcagactatcagcgtgagactacgattccatcaatgcctgtcaagggcaagtattgacatgtcgtcgtaacctgtagaacggagtaacctcggtgtgcggttgtatgcctgctgtggattgctgctgtgtcctgcttatccacaacattttgcgcacggttatgtggacaaaatacctggttacccaggccgtgccggcacgttaaccgggctgcatccgatgcaagtgtgtcgctgtcgagttt

SEQ ID NO: 60 - DNA, 23401 bp, Artificial Sequence
  Description of Artificial Sequence: Synthetic polynucleotide
aaacggatccttcgaaacgaaattaatacgactcactatagggaagtttttcgcgtctgatgaggccgttaggccgaaactcctctccggagtcacgcgaaaaaatgcgtacaacaaacttgcataaaccaaaaaaatggggcaaataagaatttgataagtaccacttaaatttaactcccttgcttagcgatggtgagcgagctgattaaggagaacatgcacatgaagctgtacatggagggcaccgtgaacaaccaccacttcaagtgcacatccgagggcgaaggcaagccctacgagggcacccagaccatgagaatcaaggcggtcgagggcggccctctccccttcgccttcgacatcctggctaccagcttcatgtacggcagcaaaaccttcatcaaccacacccagggcatccccgacttctttaagcagtccttccccgagggcttcacatgggagagagtcaccacatacgaagacgggggcgtgctgaccgctacccaggacaccagcctccaggacggctgcctcatctacaacgtcaagatcagaggggtgaacttcccatccaacggccctgtgatgcagaagaaaacactcggctgggaggcctccaccgagaccctgtaccccgctgacggcggcctggaaggcagagccgacatggccctgaagctcgtgggcgggggccacctgatctgcaacttgaagaccacatacagatccaagaaacccgctaagaacctcaagatgcccggcgtctactatgtggacagaagactggaaagaatcaaggaggccgacaaagagacctacgtcgagcagcacgaggtggctgtggccagatactgcgacctccctagcaaactggggcacagatgagtattcaattatagttattaaaaacttaacagaagacaaaaatggggcaaataagaatttgataagtaccacttaaatttaactcccttgcttagcgatgggttcgaattcgctatcgatgataaaagtacgtctacaaaatctatttgataatgatgaagtagcgctactaaaaataacgtgttatacggataaactaatacatctaacgaatgcgctagcgaaagcggtaatacatacgataaaactaaatggtatagtatttgtacatgtaataacgtcgtcggatatatgtccgaataataatatagtagtaaaatcgaattttacgacgatgccggtactacaaaatggtggttatatatgggaaatgatggaactaacgcattgttcgcaaccgaatggtctactagatgataattgtgaaataaaattttcgaaaaaactatcggattcgacgatgacgaattatatgaatcaactatcggaactactaggttttgatctaaatccgtaaattataattaatatcaactagcaaatcaatgtcactaacaccattagttaatataaaacttaacagaagacaaaaatggggcaaataaatcaattcagccaacccaaccatggatacgacgcataatgataatacgccgcaacgtctaatgataacggatatgcgtccgctatcgctagaaacgataataacgtcgctaacgcgtgatataataacgcataaatttatatatctaataaatcatgaatgtatagtacgtaaactagatgaacgtcaagcgacgtttacgtttctagtaaattatgaaatgaaactactacataaagtaggttcgacgaaatataaaaaatatacggaatataatacgaaatatggtacgtttccgatgccgatatttataaatcatgatggttttctagaatgtataggtataaaaccgacgaaacatacgccgataatatataaatatgatctaaatccgtaaatttcaacacaatattcacacaatctaaaacaacaactctatgcataactatactccatagtccagatggagcctgaaaattatagtaatttaaaattaaggagagatataagatagaagatggggcaaatacaaagatggctcttagcaaagtcaagttgaatgatacactcaacaaagatcaacttctgtcatccagcaaatacaccatccaacggagcacaggagatagtattgatactcctaattatgatgtgcagaaacacatcaataagttatgtggcatgttattaatcacagaagatgctaatcataaattcactgggttaataggtatgttatatgcgatgtctaggttaggaagagaagacaccataaaaatactcagagatgcgggatatcatgtaaaagcaaatggagtagatgtaacaacacatcgtcaagacattaatggaaaagaaatgaaatttgaagtgttaacattggcaagcttaacaactgaaattcaaatcaacattgagatagaatctagaaaatcctacaaaaaaatgctaaaagaaatgggagaggtagctccagaatacaggcatgactctcctgattgtgggatgataatattatgtatagcagcattagtaataactaaattagcagcaggggacagatctggtcttacagccgtgattaggagagctaataatgtcctaaaaaatgaaatgaaacgttacaaaggcttactacccaaggacatagccaacagcttctatgaagtgtttgaaaaacatccccactttatagatgtttttgttcattttggtatagcacaatcttctaccagaggtggcagtagagttgaagggatttttgcaggattgtttatgaatgcctatggtgcagggcaagtgatgttacggtggggagtcttagcaaaatcagttaaaaatattatgttaggacatgctagtgtgcaagcagaaatggaacaagttgttgaggtttatgaatatgcccaaaaattgggtggtgaagcaggattctaccatatattgaacaacccaaaagcatcattattatctttgactcaatttcctcacttctccagtgtagtattaggcaatgctgctggcctaggcataatgggagagtacagaggtacaccgaggaatcaagatctatatgatgcagcaaaggcatatgctgaacaactcaaagaaaatggtgtgattaactacagtgtactagacttgacagcagaagaactagaggctatcaaacatcagcttaatccaaaagataatgatgtagagctttgagttaataaaaaatggggcaaataaatcatcatggaaaagtttgctcctgaattccatggagaagatgcaaacaacagggctactaaattcctagaatcaataaagggcaaattcacatcacccaaagatcccaagaaaaaagatagtatcatatctgtcaactcaatagatatagaagtaaccaaagaaagccctataacatcaaattcaactattatcaacccaacaaatgagacagatgatactgcagggaacaagcccaattatcaaagaaaacctctagtaagtttcaaagaagaccctacaccaagtgataatcccttttctaaactatacaaagaaaccatagaaacatttgataacaatgaagaagaatccagctattcatacgaagaaataaatgatcagacaaacgataatataacagcaagattagataggattgatgaaaaattaagtgaaatactaggaatgcttcacacattagtagtggcaagtgcaggacctacatctgctcgggatggtataagagatgccatgattggtttaagagaagaaatgatagaaaaaatcagaactgaagcattaatgaccaatgacagattagaagctatggcaagactcaggaatgaggaaagtgaaaagatggcaaaagacacatcagatgaagtgtctctcaatccaacatcagagaaattgaacaacctattggaagggaatgatagtgacaatgatctatcacttgaagatttctgattagttaccactcttcacatcaacacacaataccaacagaagaccaacaaactaaccaacccaatcatccaaccaaacatccatccgccaatcagccaaacagccaacaaaacaaccagccaatccaaaactaaccacccggaaaaaatctataatatagttacaaaaaaaggaaagggtggggcaaatatggaaacatacgtgaacaagcttcacgaaggctccacatacacagctgctgttcaatacaatgtcttagaaaaagacgatgaccctgcatcacttacaatatgggtgcccatgttccaatcatctatgccagcagatttacttataaaagaactagctaatgtcaacatactagtgaaacaaatatccacacccaagggaccttcactaagagtcatgataaactcaagaagtgcagtgctagcacaaatgcccagcaaatttaccatatgcgctaatgtgtccttggatgaaagaagcaaactagcatatgatgtaaccacaccctgtgaaatcaaggcatgtagtctaacatgcctaaaatcaaaaaatatgttgactacagttaaagatctcactatgaagacactcaaccctacacatgatattattgctttatgtgaatttgaaaacatagtaacatcaaaaaaagtcataataccaacatacctaagatccatcagtgtcagaaataaagatctgaacacacttgaaaatataacaaccactgaattcaaaaatgctatcacaaatgcaaaaatcatcccttactcaggattactattagtcatcacagtgactgacaacaaaggagcattcaaatacataaagccacaaagtcaattcatagtagatcttggagcttacctagaaaaagaaagtatatattatgttaccacaaattggaagcacacagctacacgatttgcaatcaaacccatggaagattaacctttttcctctacatcagtgtgttaattcatacaaactttctacctacattcttcacttcaccatcacaatcacaaacactctgtggttcaaccaatcaaacaaaacttatctgaagtcccagatcatcccaagtcattgtttatcagatctagtactcaaataagttaataaaaaatatacacatggacgtccatggggcaaatgcaaacatgtttgtttttcttgttttattgccactagtctctagtcagtgtgttaatcttacaaccagaactcaattaccccctgcatacactaattctttcacacgtggtgtttattaccctgacaaagttttcagatcctcagttttacattcaactcaggacttgttcttacctttcttttccaatgttacttggttccatgctatacatgtctctgggaccaatggtactaagaggtttgataaccctgtcctaccatttaatgatggtgtttattttgcttccactgagaagtctaacataataagaggctggatttttggtactactttagattcgaagacccagtccctacttattgttaataacgctactaatgttgttattaaagtctgtgaatttcaattttgtaatgatccatttttgggtgtttattaccacaaaaacaacaaaagttggatggaaagtgagttcagagtttattctagtgcgaataattgcacttttgaatatgtctctcagccttttcttatggaccttgaaggaaaacagggtaatttcaaaaatcttagggaatttgtgtttaagaatattgatggttattttaaaatatattctaagcacacgcctattaatttagtgcgtgatctccctcagggtttttcggctttagaaccattggtagatttgccaataggtattaacatcactaggtttcaaactttacttgctttacatagaagttatttgactcctggtgattcttcttcaggttggacagctggtgctgcagcttattatgtgggttatcttcaacctaggacttttctattaaaatataatgaaaatggaaccattacagatgctgtagactgtgcacttgaccctctctcagaaacaaagtgtacgttgaaatccttcactgtagaaaaaggaatctatcaaacttctaactttagagtccaaccaacagaatctattgttagatttcctaatattacaaacttgtgcccttttggtgaagtttttaacgccaccagatttgcatctgtttatgcttggaacaggaagagaatcagcaactgtgttgctgattattctgtcctatataattccgcatcattttccacttttaagtgttatggagtgtctcctactaaattaaatgatctctgctttactaatgtctatgcagattcatttgtaattagaggtgatgaagtcagacaaatcgctccagggcaaactggaaagattgctgattataattataaattaccagatgattttacaggctgcgttatagcttggaattctaacaatcttgattctaaggttggtggtaattataattacctgtatagattgtttaggaagtctaatctcaaaccttttgagagagatatttcaactgaaatctatcaggccggtagcacaccttgtaatggtgttgaaggttttaattgttactttcctttacaatcatatggtttccaacccactaatggtgttggttaccaaccatacagagtagtagtactttcttttgaacttctacatgcaccagcaactgtttgtggacctaaaaagtctactaatttggttaaaaacaaatgtgtcaatttcaacttcaatggtttaacaggcacaggtgttcttactgagtctaacaaaaagtttctgcctttccaacaatttggcagagacattgctgacactactgatgctgtccgtgatccacagacacttgagattcttgacattacaccatgttcttttggtggtgtcagtgttataacaccaggaacaaatacttctaaccaggttgctgttctttatcaggatgttaactgcacagaagtccctgttgctattcatgcagatcaacttactcctacttggcgtgtttattctacaggttctaatgtttttcaaacacgtgcaggctgtttaataggggctgaacatgtcaacaactcatatgagtgtgacatacccattggtgcaggtatatgcgctagttatcagactcagactaattctcctcggcgggcacgtagtgtagctagtcaatccatcattgcctacactatgtcacttggtgcagaaaattcagttgcttactctaataactctattgccatacccacaaattttactattagtgttaccacagaaattctaccagtgtctatgaccaagacatcagtagattgtacaatgtacatttgtggtgattcaactgaatgcagcaatcttttgttgcaatatggcagtttttgtacacaattaaaccgtgctttaactggaatagctgttgaacaagacaaaaacacccaagaagtttttgcacaagtcaaacaaatttacaaaacaccaccaattaaagattttggtggttttaatttttcacaaatattaccagatccatcaaaaccaagcaagaggtcatttattgaagatctacttttcaacaaagtgacacttgcagatgctggcttcatcaaacaatatggtgattgccttggtgatattgctgctagagacctcatttgtgcacaaaagtttaacggccttactgttttgccacctttgctcacagatgaaatgattgctcaatacacttctgcactgttagcgggtacaatcacttctggttggacctttggtgcaggtgctgcattacaaataccatttgctatgcaaatggcttataggtttaatggtattggagttacacagaatgttctctatgagaaccaaaaattgattgccaaccaatttaatagtgctattggcaaaattcaagactcactttcttccacagcaagtgcacttggaaaacttcaagatgtggtcaaccaaaatgcacaagctttaaacacgcttgttaaacaacttagctccaattttggtgcaatttcaagtgttttaaatgatatcctttcacgtcttgacaaagttgaggctgaagtgcaaattgataggttgatcacaggcagacttcaaagtttgcagacatatgtgactcaacaattaattagagctgcagaaatcagagcttctgctaatcttgctgctactaaaatgtcagagtgtgtacttggacaatcaaaaagagttgatttttgtggaaagggctatcatcttatgtccttccctcagtcagcacctcatggtgtagtcttcttgcatgtgacttatgtccctgcacaagaaaagaacttcacaactgctcctgccatttgtcatgatggaaaagcacactttcctcgtgaaggtgtctttgtttcaaatggcacacactggtttgtaacacaaaggaatttttatgaaccacaaatcattactacagacaacacatttgtgtctggtaactgtgatgttgtaataggaattgtcaacaacacagtttatgatcctttgcaacctgaattagactcattcaaggaggagttagataaatattttaagaatcatacatcaccagatgttgatttaggtgacatctctggcattaatgcttcagttgtaaacattcaaaaagaaattgaccgcctcaatgaggttgccaagaatttaaatgaatctctcatcgatctccaagaacttggaaagtatgagcagtatataaaatggccatggtacatttggctaggttttatagctggcttgattgccatagtaatggtgacaattatgctttgctgtatgaccagttgctgtagttgtctcaagggctgttgttcttgtggatcctgctgcaaatttgatgaagacgactctgagccagtgctcaaaggagtcaaattacattacacataaataaaaatagcacctaatcatgttcttacaatggtttactatctgctcatagacaacccatctatcattggattttcttaaaatctgaacttcatcgaaactcttatctataaaccatctcacttacactatttaagtagattcctagtttatagttatataaaacacaattgaatgccagtcgaccttaccatctgtaaaaatgaaaactggggcaaatatgtcacgaaggaatccttgcaaatttgaaattcgaggtcattgcttaaatggtaagaggtgtcattttagtcataattattttgaatggccaccccatgcactgcttgtaagacaaaactttatgttaaacagaatacttaagtctatggataaaagtatagataccttatcagaaataagtggagctgcagagttggacagaacagaagagtatgctcttggtgtagttggagtgctagagagttatataggatcaataaacaatataactaaacaatcagcatgtgttgccatgagcaaactcctcactgaactcaatagtgatgatatcaaaaagctgagggacaatgaagagctaaattcacccaagataagagtgtacaatactgtcatatcatatattgaaagcaacaggaaaaacaataaacaaactatccatctgttaaaaagattgccagcagacgtattgaagaaaaccatcaaaaacacattggatatccataagagcataaccatcaacaacccaaaagaatcaactgttagtgatacaaatgaccatgccaaaaataatgatactacctgacaaatatccttgtagtataacttccatactaataacaagtagatgtagagttactatgtataatcaaaagaacacactatatttcaatcaaaacaacccaaataaccatatgtactcaccgaatcaaacattcaatgaaatccattggacctctcaagaattgattgacacaattcaaaattttctacaacatctaggtattattgaggatatatatacaatatatatattagtgtcataacactcaattctaacactcaccacatcgttacattattaattcaaacaattcaagttgtgggacaaaatggatcccattattaatggaaattctgctaatgtttatctaaccgatagttatttaaaaggtgttatctctttctcagagtgtaatgctttaggaagttacatattcaatggtccttatctcaaaaatgattataccaacttaattagtagacaaaatccattaatagaacacatgaatctaaagaaactaaatataacacagtccttaatatctaagtatcataaaggtgaaataaaattagaagaacctacttattttcagtcattacttatgacatacaagagtatgacctcgtcagaacagattgctaccactaatttacttaaaaagataataagaagagctatagaaataagtgatgtcaaagtctatgctatattgaataaactagggcttaaagaaaaggacaagattaaatccaacaatggacaagatgaagacaactcagttattacgaccataatcaaagatgatatactttcagctgttaaagataatcaatctcatcttaaagcagacaaaaatcactctacaaaacaaaaagacacaatcaaaacaacactcttgaagaaattgatgtgttcaatgcaacatcctccatcatggttaatacattggtttaacttatacacaaaattaaacaacatattaacacagtatcgatcaaatgaggtaaaaaaccatgggtttacattgatagataatcaaactcttagtggatttcaatttattttgaaccaatatggttgtatagtttatcataaggaactcaaaagaattactgtgacaacctataatcaattcttgacatggaaagatattagccttagtagattaaatgtttgtttaattacatggattagtaactgcttgaacacattaaataaaagcttaggcttaagatgcggattcaataatgttatcttgacacaactattcctttatggagattgtatactaaagctatttcacaatgaggggttctacataataaaagaggtagagggatttattatgtctctaattttaaatataacagaagaagatcaattcagaaaacgattttataatagtatgctcaacaacatcacagatgctgctaataaagctcagaaaaatctgctatcaagagtatgtcatacattattagataagacagtgtccgataatataataaatggcagatggataattctattaagtaagttccttaaattaattaagcttgcaggtgacaataaccttaacaatctgagtgaactatattttttgttcagaatatttggacacccaatggtagatgaaagacaagccatggatgctgttaaaattaattgcaatgagaccaaattttacttgttaagcagtctgagtatgttaagaggtgcctttatatatagaattataaaagggtttgtaaataattacaacagatggcctactttaagaaatgctattgttttacccttaagatggttaacttactataaactaaacacttatccttctttgttggaacttacagaaagagatttgattgtgttatcaggactacgtttctatcgtgagtttcggttgcctaaaaaagtggatcttgaaatgattataaatgataaagctatatcacctcctaaaaatttgatatggactagtttccctagaaattacatgccatcacacatacaaaactatatagaacatgaaaaattaaaattttccgagagtgataaatcaagaagagtattagagtattatttaagagataacaaattcaatgaatgtgatttatacaactgtgtagttaatcaaagttatctcaacaaccctaatcatgtggtatcattgacaggcaaagaaagagaactcagtgtaggtagaatgtttgcaatgcaaccgggaatgttcagacaggttcaaatattggcagagaaaatgatagctgaaaacattttacaattctttcctgaaagtcttacaagatatggtgatctagaactacaaaaaatattagaattgaaagcaggaataagtaacaaatcaaatcgctacaatgataattacaacaattacattagtaagtgctctatcatcacagatctcagcaaattcaatcaagcatttcgatatgaaacgtcatgtatttgtagtgatgtgctggatgaactgcatggtgtacaatctctattttcctggttacatttaactattcctcatgtcacaataatatgcacatataggcatgcacccccctatataggagatcatattgtagatcttaacaatgtagatgaacaaagtggattatatagatatcacatgggtggcatcgaagggtggtgtcaaaaactgtggaccatagaagctatatcactattggatctaatatctctcaaagggaaattctcaattactgctttaattaatggtgacaatcaatcaatagatataagcaaaccaatcagactcatggaaggtcaaactcatgctcaagcagattatttgctagcattaaatagccttaaattactgtataaagagtatgcaggcataggccacaaattaaaaggaactgagacttatatatcacgagatatgcaatttatgagtaaaacaattcaacataacggtgtatattacccagctagtataaagaaagtcctaagagtgggaccgtggataaacactatacttgatgatttcaaagtgagtctagaatctataggtagtttgacacaagaattagaatatagaggtgaaagtctattatgcagtttaatatttagaaatgtatggttatataatcagattgctctacaattaaaaaatcatgcattatgtaacaataaactatatttggacatattaaaggttctgaaacacttaaaaaccttttttaatcttgataatattgatacagcattaacattgtatatgaatttacccatgttatttggtggtggtgatcccaacttgttatatcgaagtttctatagaagaactcctgacttcctcacagaggctatagttcactctgtgttcatacttagttattatacaaaccatgacttaaaagataaacttcaagatctgtcagatgatagattgaataagttcttaacatgcataatcacgtttgacaaaaaccctaatgctgaattcgtaacattgatgagagatcctcaagctttagggtctgagagacaagctaaaattactagcgaaatcaatagactggcagttacagaggttttgagtacagctccaaacaaaatattctccaaaagtgcacaacattatactactacagagatagatctaaatgatattatgcaaaatatagaacctacatatcctcatgggctaagagttgtttatgaaagtttacccttttataaagcagagaaaatagtaaatcttatatcaggtacaaaatctataactaacatactggaaaaaacttctgccatagacttaacagatattgatagagccactgagatgatgaggaaaaacataactttgcttataaggatacttccattggattgtaacagagataaaagagagatattgagtatggaaaacctaagtattactgaattaagcaaatatgttagggaaagatcttggtctttatccaatatagttggtgttacatcacccagtatcatgtatacaatggacatcaaatatactacaagcactatatctagtggcataattatagagaaatataatgttaacagtttaacacgtggtgagagaggacccactaaaccatgggttggttcatctacacaagagaaaaaaacaatgccagtttataatagacaagtcttaaccaaaaaacagagagatcaaatagatctattagcaaaattggattgggtgtatgcatctatagataacaaggatgaattcatggaagaactcagcataggaacccttgggttaacatatgaaaaggccaagaaattatttccacaatatttaagtgtcaattatttgcatcgccttacagtcagtagtagaccatgtgaattccctgcatcaataccagcttatagaacaacaaattatcactttgacactagccctattaatcgcatattaacagaaaagtatggtgatgaagatattgacatagtattccaaaactgtataagctttggccttagtttaatgtcagtagtagaacaatttactaatgtatgtcctaacagaattattctcatacctaagcttaatgagatacatttgatgaaacctcccatattcacaggtgatgttgatattcacaagttaaaacaagtgatacaaaaacagcatatgtttttaccagacaaaataagtttgactcaatatgtggaattattcttaagtaataaaacactcaaatctggatctcatgttaattctaatttaatattggcacataaaatatctgactattttcataatacttacattttaagtactaatttagctggacattggattctgattatacaacttatgaaagattctaaaggtatttttgaaaaagattggggagagggatatataactgatcatatgtttattaatttgaaagttttcttcaatgcttataagacctatctcttgtgttttcataaaggttatggcaaagcaaagctggagtgtgatatgaacacttcagatcttctatgtgtattggaattaatagacagtagttattggaagtctatgtctaaggtatttttagaacaaaaagttatcaaatacattcttagccaagatgcaagtttacatagagtaaaaggatgtcatagcttcaaattatggtttcttaaacgtcttaatgtagcagaattcacagtttgcccttgggttgttaacatagattatcatccaacacatatgaaagcaatattaacttatatagatcttgttagaatgggattgataaatatagatagaatacacattaaaaataaacacaaattcaatgatgaattttatacttctaatctcttctacattaattataacttctcagataatactcatctattaactaaacatataaggattgctaattctgaattagaaaataattacaacaaattatatcatcctacaccagaaaccctagagaatatactagccaatccgattaaaagtaatgacaaaaagacactgaatgactattgtataggtaaaaatgttgactcaataatgttaccattgttatctaataagaagcttattaaatcgtctgcaatgattagaaccaattacagcaaacaagatttgtataatttattccctatggttgtgattgatagaattatagatcattcaggcaatacagccaaatccaaccaactttacactactacttcccaccaaatatctttagtgcacaatagcacatcactttactgcatgcttccttggcatcatattaatagattcaattttgtatttagttctacaggttgtaaaattagtatagagtatattttaaaagatcttaaaattaaagatcccaattgtatagcattcataggtgaaggagcagggaatttattattgcgtacagtagtggaacttcatcctgacataagatatatttacagaagtctgaaagattgcaatgatcatagtttacctattgagtttttaaggctgtacaatggacatatcaacattgattatggtgaaaatttgaccattcctgctacagatgcaaccaacaacattcattggtcttatttacatataaagtttgctgaacctatcagtctttttgtctgtgatgccgaattgtctgtaacagtcaactggagtaaaattataatagaatggagcaagcatgtaagaaagtgcaagtactgttcctcagttaataaatgtatgttaatagtaaaatatcatgctcaagatgatattgatttcaaattagacaatataactatattaaaaacttatgtatgcttaggcagtaagttaaagggatcggaggtttacttagtccttacaataggtcctgcgaatatattcccagtatttaatgtagtacaaaatgctaaattgatactatcaagaaccaaaaatttcatcatgcctaagaaagctgataaagagtctattgatgcaaatattaaaagtttgataccctttctttgttaccctataacaaaaaaaggaattaatactgcattgtcaaaactaaagagtgttgttagtggagatatactatcatattctatagctggacgtaatgaagttttcagcaataaacttataaatcataagcatatgaacatcttaaaatggttcaatcatgttttaaatttcagatcaacagaactaaactataaccatttatatatggtagaatctacatatccttacctaagtgaattgttaaacagcttgacaaccaatgaacttaaaaaactgattaaaatcacaggtagtctgttatacaactttcataatgaataatgaataaagatcttataataaaaattcccatagctatacactaacactgtattcaattatagttattaaaaattaaaaatcgtacgattttttaaataacttttagtgaactaatcctaaagttatcattttaatcttggaggaataaatttaaaccctaatctaattggtttatatgtgtattaactaaattacgagatattagtttttgacactttttttctcgtgggtcggcatggcatctccacctcctcgcggtccgacctgggcatccgaaggaggacgcacgtccactcggatggctaagggagctgctaacaaagcccgaaaggaagctgagttggctgctgccaccgctgagcaataactagcataaccccttggggcctctaaacgggtcttgaggggttttttgctgaaaggaggaactatatacgcgtaagcttctcgacccattctcatgtttgacagcttatcatcgaatttctgccattcatccgcttattatcacttattcaggcgtagcaaccaggcgtttaagggcaccaataactgccttaaaaaaattacgccccgccctgccactcatcgcagtactgttgtaattcattaagcattctgccgacatggaagccatcacagacggcatgatgaacctgaatcgccagcggcatcagcaccttgtcgccttgcgtataatatttgcccatggtgaaaacgggggcgaagaagttgtccatattggccacgtttaaatcaaaactggtgaaactcacccagggattggctgagacgaaaaacatattctcaataaaccctttagggaaataggccaggttttcaccgtaacacgccacatcttgcgaatatatgtgtagaaactgccggaaatcgtcgtggtattcactccagagcgatgaaaacgtttcagtttgctcatggaaaacggtgtaacaagggtgaacactatcccatatcaccagctcaccgtctttcattgccatacggaattccggatgagcattcatcaggcgggcaagaatgtgaataaaggccggataaaacttgtgcttatttttctttacggtctttaaaaaggccgtaatatccagctgaacggtctggttataggtacattgagcaactgactgaaatgcctcaaaatgttctttacgatgccattgggatatatcaacggtggtatatccagtgatttttttctccattttagcttccttagctcctgaaaatctcgataactcaaaaaatacgcccggtagtgatcttatttcattatggtgaaagttggaacctcttacgtgccgatcaacgtctcattttcgccaaaagttggcccagggcttcccggtatcaacagggacaccaggatttatttattctgcgaagtgatcttccgtcacaggtatttattcgcgataagctcatggagcggcgtaaccgtcgcacaggaaggacagagaaagcgcggatctgggaagtgacggacagaacggtcaggacctggattggggaggcggttgccgccgctgctgctgacggtgtgacgttctctgttccggtcacaccacatacgttccgccattcctatgcgatgcacatgctgtatgccggtataccgctgaaagttctgcaaagcctgatgggacataagtccatcagttcaacggaagtctacacgaaggtttttgcgctggatgtggctgcccggcaccgggtgcagtttgcgatgccggagtctgatgcggttgcgatgctgaaacaattatcctgagaataaatgccttggcctttatatggaaatgtggaactgagtggatatgctgtttttgtctgttaaacagagaagctggctgttatccactgagaagcgaacgaaacagtcgggaaaatctcccattatcgtagagatccgcattattaatctcaggagcctgtgtagcgtttataggaagtagtgttctgtcatgatgcctgcaagcggtaacgaaaacgatttgaatatgccttcaggaacaatagaaatcttcgtgcggtgttacgttgaagtggagcggattatgtcagcaatggacagaacaacctaatgaacacagaaccatgatgtggtctgtccttttacagccagtaggctcgccgcagtcgagcgacggcgaagccctcgagtgagcgaggaagcaccagggaacagcacttatatattctgcttacacacgatgcctgaaaaaacttcccttggggttatccacttatccacggggatatttttataattattttttttatagtttttagatcttcttttttagagcgccttgtaggcctttatccatgctggttctagagaaggtgttgtgacaaattgccctttcagtgtgacaaatcaccctcaaatgacagtcctgtctgtgacaaattgcccttaaccctgtgacaaattgccctcagaagaagctgttttttcacaaagttatccctgcttattgactcttttttatttagtgtgacaatctaaaaacttgtcacacttcacatggatctgtcatggcggaaacagcggttatcaatcacaagaaacgtaaaaatagcccgcgaatcgtccagtcaaacgacctcactgaggcggcatatagtctctcccgggatcaaaaacgtatgctgtatctgttcgttgaccagatcagaaaatctgatggcaccctacaggaacatgacggtatctgcgagatccatgttgctaaatatgctgaaatattcggattgacctctgcggaagccagtaaggatatacggcaggcattgaagagtttcgcggggaaggaagtggttttttatcgccctgaagaggatgccggcgatgaaaaaggctatgaatcttttccttggtttatcaaacgtgcgcacagtccatccagagggctttacagtgtacatatcaacccatatctcattcccttctttatcgggttacagaaccggtttacgcagtttcggcttagtgaaacaaaagaaatcaccaatccgtatgccatgcgtttatacgaatccctgtgtcagtatcgtaagccggatggctcaggcatcgtctctctgaaaatcgactggatcatagagcgttaccagctgcctcaaagttaccagcgtatgcctgacttccgccgccgcttcctgcaggtctgtgttaatgagatcaacagcagaactccaatgcgcctctcatacattgagaaaaagaaaggccgccagacgactcatatcgtattttccttccgcgatatcacttccatgacgacaggatagtctgagggttatctgtcacagatttgagggtggttcgtcacatttgttctgacctactgagggtaatttgtcacagttttgctgtttccttcagcctgcatggattttctcatactttttgaactgtaatttttaaggaagccaaatttgagggcagtttgtcacagttgatttccttctctttcccttcgtcatgtgacctgatatcgggggttagttcgtcatcattgatgagggttgattatcacagtttattactctgaattggctatccgcgtgtgtacctctacctggagtttttcccacggtggatatttcttcttgcgctgagcgtaagagctatctgacagaacagttcttctttgcttcctcgccagttcgctcgctatgctcggttacacggctgcggcgagcgctagtgataataagtgactgaggtatgtgctcttcttatctccttttgtagtgttgctcttattttaaacaactttgcggttttttgatgactttgcgattttgttgttgctttgcagtaaattgcaagatttaataaaaaaacgcaaagcaatgattaaaggatgttcagaatgaaactcatggaaacacttaaccagtgcataaacgctggtcatgaaatgacgaaggctatcgccattgcacagtttaatgatgacagcccggaagcgaggaaaataacccggcgctggagaataggtgaagcagcggatttagttggggtttcttctcaggctatcagagatgccgagaaagcagggcgactaccgcacccggatatggaaattcgaggacgggttgagcaacgtgttggttatacaattgaacaaattaatcatatgcgtgatgtgtttggtacgcgattgcgacgtgctgaagacgtatttccaccggtgatcggggttgctgcccataaaggtggcgtttacaaaacctcagtttctgttcatcttgctcaggatctggctctgaaggggctacgtgttttgctcgtggaaggtaacgacccccagggaacagcctcaatgtatcacggatgggtaccagatcttcatattcatgcagaagacactctcctgcctttctatcttggggaaaaggacgatgtcacttatgcaataaagcccacttgctggccggggcttgacattattccttcctgtctggctctgcaccgtattgaaactgagttaatgggcaaatttgatgaaggtaaactgcccaccgatccacacctgatgctccgactggccattgaaactgttgctcatgactatgatgtcatagttattgacagcgcgcctaacctgggtatcggcacgattaatgtcgtatgtgctgctgatgtgctgattgttcccacgcctgctgagttgtttgactacacctccgcactgcagtttttcgatatgcttcgtgatctgctcaagaacgttgatcttaaagggttcgagcctgatgtacgtattttgcttaccaaatacagcaatagtaatggctctcagtccccgtggatggaggagcaaattcgggatgcctggggaagcatggttctaaaaaatgttgtacgtgaaacggatgaagttggtaaaggtcagatccggatgagaactgtttttgaacaggccattgatcaacgctcttcaactggtgcctggagaaatgctctttctatttgggaacctgtctgcaatgaaattttcgatcgtctgattaaaccacgctgggagattagataatgaagcgtgcgcctgttattccaaaacatacgctcaatactcaaccggttgaagatacttcgttatcgacaccagctgccccgatggtggattcgttaattgcgcgcgtaggagtaatggctcgcggtaatgccattactttgcctgtatgtggtcgggatgtgaagtttactcttgaagtgctccggggtgatagtgttgagaagacctctcgggtatggtcaggtaatgaacgtgaccaggagctgcttactgaggacgcactggatgatctcatcccttcttttctactgactggtcaacagacaccggcgttcggtcgaagagtatctggtgtcatagaaattgccgatgggagtcgccgtcgtaaagctgctgcacttaccgaaagtgattatcgtgttctggttggcgagctggatgatgagcagatggctgcattatccagattgggtaacgattatcgcccaacaagtgcttatgaacgtggtcagcgttatgcaagccgattgcagaatgaatttgctggaaatatttctgcgctggctgatgcggaaaatatttcacgtaagattattacccgctgtatcaacaccgccaaattgcctaaatcagttgttgctcttttttctcaccccggtgaactatctgcccggtcaggtgatgcacttcaaaaagcctttacagataaagaggaattacttaagcagcaggcatctaaccttcatgagcagaaaaaagctggggtgatatttgaagctgaagaagttatcactcttttaacttctgtgcttaaaacgtcatctgcatcaagaactagtttaagctcacgacatcagtttgctcctggagcgacagtattgtataagggcgataaaatggtgcttaacctggacaggtctcgtgttccaactgagtgtatagagaaaattgaggccattcttaaggaacttgaaaagccagcaccctgatgcgaccacgttttagtctacgtttatctgtctttacttaatgtcctttgttacaggccagaaagcataactggcctgaatattctctctgggcccactgttccacttgtatcgtcggtctgataatcagactgggaccacggtcccactcgtatcgtcggtctgattattagtctgggaccacggtcccactcgtatcgtcggtctgattattagtctgggaccacggtcccactcgtatcgtcggtctgataatcagactgggaccacggtcccactcgtatcgtcggtctgattattagtctgggaccatggtcccactcgtatcgtcggtctgattattagtctgggaccacggtcccactcgtatcgtcggtctgattattagtctggaaccacggtcccactcgtatcgtcggtctgattattagtctgggaccacggtcccactcgtatcgtcggtctgattattagtctgggaccacgatcccactcgtgttgtcggtctgattatcggtctgggaccacggtcccacttgtattgtcgatcagactatcagcgtgagactacgattccatcaatgcctgtcaagggcaagtattgacatgtcgtcgtaacctgtagaacggagtaacctcggtgtgcggttgtatgcctgctgtggattgctgctgtgtcctgcttatccacaacattttgcgcacggttatgtggacaaaatacctggttacccaggccgtgccggcacgttaaccgggctgcatccgatgcaagtgtgtcgctgtcgagttt

SEQ ID NO: 61 - DNA, 15902 bp, Artificial Sequence
  Description of Artificial Sequence: Synthetic polynucleotide
acgcgaaaaaatgcgtacaacaaacttgcataaaccaaaaaaatggggcaaataagaatttgataagtaccacttaaatttaactcccttgcttagcgatgggttcgaattcgctatcgatgataaaagtacgtctacaaaatctatttgataatgatgaagtagcgctactaaaaataacgtgttatacggataaactaatacatctaacgaatgcgctagcgaaagcggtaatacatacgataaaactaaatggtatagtatttgtacatgtaataacgtcgtcggatatatgtccgaataataatatagtagtaaaatcgaattttacgacgatgccggtactacaaaatggtggttatatatgggaaatgatggaactaacgcattgttcgcaaccgaatggtctactagatgataattgtgaaataaaattttcgaaaaaactatcggattcgacgatgacgaattatatgaatcaactatcggaactactaggttttgatctaaatccgtaaattataattaatatcaactagcaaatcaatgtcactaacaccattagttaatataaaacttaacagaagacaaaaatggggcaaataaatcaattcagccaacccaaccatggatacgacgcataatgataatacgccgcaacgtctaatgataacggatatgcgtccgctatcgctagaaacgataataacgtcgctaacgcgtgatataataacgcataaatttatatatctaataaatcatgaatgtatagtacgtaaactagatgaacgtcaagcgacgtttacgtttctagtaaattatgaaatgaaactactacataaagtaggttcgacgaaatataaaaaatatacggaatataatacgaaatatggtacgtttccgatgccgatatttataaatcatgatggttttctagaatgtataggtataaaaccgacgaaacatacgccgataatatataaatatgatctaaatccgtaaatttcaacacaatattcacacaatctaaaacaacaactctatgcataactatactccatagtccagatggagcctgaaaattatagtaatttaaaattaaggagagatataagatagaagatggggcaaatacaaagatggctcttagcaaagtcaagttgaatgatacactcaacaaagatcaacttctgtcatccagcaaatacaccatccaacggagcacaggagatagtattgatactcctaattatgatgtgcagaaacacatcaataagttatgtggcatgttattaatcacagaagatgctaatcataaattcactgggttaataggtatgttatatgcgatgtctaggttaggaagagaagacaccataaaaatactcagagatgcgggatatcatgtaaaagcaaatggagtagatgtaacaacacatcgtcaagacattaatggaaaagaaatgaaatttgaagtgttaacattggcaagcttaacaactgaaattcaaatcaacattgagatagaatctagaaaatcctacaaaaaaatgctaaaagaaatgggagaggtagctccagaatacaggcatgactctcctgattgtgggatgataatattatgtatagcagcattagtaataactaaattagcagcaggggacagatctggtcttacagccgtgattaggagagctaataatgtcctaaaaaatgaaatgaaacgttacaaaggcttactacccaaggacatagccaacagcttctatgaagtgtttgaaaaacatccccactttatagatgtttttgttcattttggtatagcacaatcttctaccagaggtggcagtagagttgaagggatttttgcaggattgtttatgaatgcctatggtgcagggcaagtgatgttacggtggggagtcttagcaaaatcagttaaaaatattatgttaggacatgctagtgtgcaagcagaaatggaacaagttgttgaggtttatgaatatgcccaaaaattgggtggtgaagcaggattctaccatatattgaacaacccaaaagcatcattattatctttgactcaatttcctcacttctccagtgtagtattaggcaatgctgctggcctaggcataatgggagagtacagaggtacaccgaggaatcaagatctatatgatgcagcaaaggcatatgctgaacaactcaaagaaaatggtgtgattaactacagtgtactagacttgacagcagaagaactagaggctatcaaacatcagcttaatccaaaagataatgatgtagagctttgagttaataaaaaatggggcaaataaatcatcatggaaaagtttgctcctgaattccatggagaagatgcaaacaacagggctactaaattcctagaatcaataaagggcaaattcacatcacccaaagatcccaagaaaaaagatagtatcatatctgtcaactcaatagatatagaagtaaccaaagaaagccctataacatcaaattcaactattatcaacccaacaaatgagacagatgatactgcagggaacaagcccaattatcaaagaaaacctctagtaagtttcaaagaagaccctacaccaagtgataatcccttttctaaactatacaaagaaaccatagaaacatttgataacaatgaagaagaatccagctattcatacgaagaaataaatgatcagacaaacgataatataacagcaagattagataggattgatgaaaaattaagtgaaatactaggaatgcttcacacattagtagtggcaagtgcaggacctacatctgctcgggatggtataagagatgccatgattggtttaagagaagaaatgatagaaaaaatcagaactgaagcattaatgaccaatgacagattagaagctatggcaagactcaggaatgaggaaagtgaaaagatggcaaaagacacatcagatgaagtgtctctcaatccaacatcagagaaattgaacaacctattggaagggaatgatagtgacaatgatctatcacttgaagatttctgattagttaccactcttcacatcaacacacaataccaacagaagaccaacaaactaaccaacccaatcatccaaccaaacatccatccgccaatcagccaaacagccaacaaaacaaccagccaatccaaaactaaccacccggaaaaaatctataatatagttacaaaaaaaggaaagggtggggcaaatatggaaacatacgtgaacaagcttcacgaaggctccacatacacagctgctgttcaatacaatgtcttagaaaaagacgatgaccctgcatcacttacaatatgggtgcccatgttccaatcatctatgccagcagatttacttataaaagaactagctaatgtcaacatactagtgaaacaaatatccacacccaagggaccttcactaagagtcatgataaactcaagaagtgcagtgctagcacaaatgcccagcaaatttaccatatgcgctaatgtgtccttggatgaaagaagcaaactagcatatgatgtaaccacaccctgtgaaatcaaggcatgtagtctaacatgcctaaaatcaaaaaatatgttgactacagttaaagatctcactatgaagacactcaaccctacacatgatattattgctttatgtgaatttgaaaacatagtaacatcaaaaaaagtcataataccaacatacctaagatccatcagtgtcagaaataaagatctgaacacacttgaaaatataacaaccactgaattcaaaaatgctatcacaaatgcaaaaatcatcccttactcaggattactattagtcatcacagtgactgacaacaaaggagcattcaaatacataaagccacaaagtcaattcatagtagatcttggagcttacctagaaaaagaaagtatatattatgttaccacaaattggaagcacacagctacacgatttgcaatcaaacccatggaagattaacctttttcctctacatcagtgtgttaattcatacaaactttctacctacattcttcacttcaccatcacaatcacaaacactctgtggttcaaccaatcaaacaaaacttatctgaagtcccagatcatcccaagtcattgtttatcagatctagtactcaaataagttaataaaaaatatacacatggacgtccatggggcaaatgcaaacatgtttgtttttcttgttttattgccactagtctctagtcagtgtgttaatcttacaaccagaactcaattaccccctgcatacactaattctttcacacgtggtgtttattaccctgacaaagttttcagatcctcagttttacattcaactcaggacttgttcttacctttcttttccaatgttacttggttccatgctatacatgtctctgggaccaatggtactaagaggtttgataaccctgtcctaccatttaatgatggtgtttattttgcttccactgagaagtctaacataataagaggctggatttttggtactactttagattcgaagacccagtccctacttattgttaataacgctactaatgttgttattaaagtctgtgaatttcaattttgtaatgatccatttttgggtgtttattaccacaaaaacaacaaaagttggatggaaagtgagttcagagtttattctagtgcgaataattgcacttttgaatatgtctctcagccttttcttatggaccttgaaggaaaacagggtaatttcaaaaatcttagggaatttgtgtttaagaatattgatggttattttaaaatatattctaagcacacgcctattaatttagtgcgtgatctccctcagggtttttcggctttagaaccattggtagatttgccaataggtattaacatcactaggtttcaaactttacttgctttacatagaagttatttgactcctggtgattcttcttcaggttggacagctggtgctgcagcttattatgtgggttatcttcaacctaggacttttctattaaaatataatgaaaatggaaccattacagatgctgtagactgtgcacttgaccctctctcagaaacaaagtgtacgttgaaatccttcactgtagaaaaaggaatctatcaaacttctaactttagagtccaaccaacagaatctattgttagatttcctaatattacaaacttgtgcccttttggtgaagtttttaacgccaccagatttgcatctgtttatgcttggaacaggaagagaatcagcaactgtgttgctgattattctgtcctatataattccgcatcattttccacttttaagtgttatggagtgtctcctactaaattaaatgatctctgctttactaatgtctatgcagattcatttgtaattagaggtgatgaagtcagacaaatcgctccagggcaaactggaaagattgctgattataattataaattaccagatgattttacaggctgcgttatagcttggaattctaacaatcttgattctaaggttggtggtaattataattacctgtatagattgtttaggaagtctaatctcaaaccttttgagagagatatttcaactgaaatctatcaggccggtagcacaccttgtaatggtgttgaaggttttaattgttactttcctttacaatcatatggtttccaacccactaatggtgttggttaccaaccatacagagtagtagtactttcttttgaacttctacatgcaccagcaactgtttgtggacctaaaaagtctactaatttggttaaaaacaaatgtgtcaatttcaacttcaatggtttaacaggcacaggtgttcttactgagtctaacaaaaagtttctgcctttccaacaatttggcagagacattgctgacactactgatgctgtccgtgatccacagacacttgagattcttgacattacaccatgttcttttggtggtgtcagtgttataacaccaggaacaaatacttctaaccaggttgctgttctttatcaggatgttaactgcacagaagtccctgttgctattcatgcagatcaacttactcctacttggcgtgtttattctacaggttctaatgtttttcaaacacgtgcaggctgtttaataggggctgaacatgtcaacaactcatatgagtgtgacatacccattggtgcaggtatatgcgctagttatcagactcagactaattctcctcggcgggcacgtagtgtagctagtcaatccatcattgcctacactatgtcacttggtgcagaaaattcagttgcttactctaataactctattgccatacccacaaattttactattagtgttaccacagaaattctaccagtgtctatgaccaagacatcagtagattgtacaatgtacatttgtggtgattcaactgaatgcagcaatcttttgttgcaatatggcagtttttgtacacaattaaaccgtgctttaactggaatagctgttgaacaagacaaaaacacccaagaagtttttgcacaagtcaaacaaatttacaaaacaccaccaattaaagattttggtggttttaatttttcacaaatattaccagatccatcaaaaccaagcaagaggtcatttattgaagatctacttttcaacaaagtgacacttgcagatgctggcttcatcaaacaatatggtgattgccttggtgatattgctgctagagacctcatttgtgcacaaaagtttaacggccttactgttttgccacctttgctcacagatgaaatgattgctcaatacacttctgcactgttagcgggtacaatcacttctggttggacctttggtgcaggtgctgcattacaaataccatttgctatgcaaatggcttataggtttaatggtattggagttacacagaatgttctctatgagaaccaaaaattgattgccaaccaatttaatagtgctattggcaaaattcaagactcactttcttccacagcaagtgcacttggaaaacttcaagatgtggtcaaccaaaatgcacaagctttaaacacgcttgttaaacaacttagctccaattttggtgcaatttcaagtgttttaaatgatatcctttcacgtcttgacaaagttgaggctgaagtgcaaattgataggttgatcacaggcagacttcaaagtttgcagacatatgtgactcaacaattaattagagctgcagaaatcagagcttctgctaatcttgctgctactaaaatgtcagagtgtgtacttggacaatcaaaaagagttgatttttgtggaaagggctatcatcttatgtccttccctcagtcagcacctcatggtgtagtcttcttgcatgtgacttatgtccctgcacaagaaaagaacttcacaactgctcctgccatttgtcatgatggaaaagcacactttcctcgtgaaggtgtctttgtttcaaatggcacacactggtttgtaacacaaaggaatttttatgaaccacaaatcattactacagacaacacatttgtgtctggtaactgtgatgttgtaataggaattgtcaacaacacagtttatgatcctttgcaacctgaattagactcattcaaggaggagttagataaatattttaagaatcatacatcaccagatgttgatttaggtgacatctctggcattaatgcttcagttgtaaacattcaaaaagaaattgaccgcctcaatgaggttgccaagaatttaaatgaatctctcatcgatctccaagaacttggaaagtatgagcagtatataaaatggccatggtacatttggctaggttttatagctggcttgattgccatagtaatggtgacaattatgctttgctgtatgaccagttgctgtagttgtctcaagggctgttgttcttgtggatcctgctgcaaatttgatgaagacgactctgagccagtgctcaaaggagtcaaattacattacacataaataaaaatagcacctaatcatgttcttacaatggtttactatctgctcatagacaacccatctatcattggattttcttaaaatctgaacttcatcgaaactcttatctataaaccatctcacttacactatttaagtagattcctagtttatagttatataaaacacaattgaatgccagtcgaccttaccatctgtaaaaatgaaaactggggcaaatatgtcacgaaggaatccttgcaaatttgaaattcgaggtcattgcttaaatggtaagaggtgtcattttagtcataattattttgaatggccaccccatgcactgcttgtaagacaaaactttatgttaaacagaatacttaagtctatggataaaagtatagataccttatcagaaataagtggagctgcagagttggacagaacagaagagtatgctcttggtgtagttggagtgctagagagttatataggatcaataaacaatataactaaacaatcagcatgtgttgccatgagcaaactcctcactgaactcaatagtgatgatatcaaaaagctgagggacaatgaagagctaaattcacccaagataagagtgtacaatactgtcatatcatatattgaaagcaacaggaaaaacaataaacaaactatccatctgttaaaaagattgccagcagacgtattgaagaaaaccatcaaaaacacattggatatccataagagcataaccatcaacaacccaaaagaatcaactgttagtgatacaaatgaccatgccaaaaataatgatactacctgacaaatatccttgtagtataacttccatactaataacaagtagatgtagagttactatgtataatcaaaagaacacactatatttcaatcaaaacaacccaaataaccatatgtactcaccgaatcaaacattcaatgaaatccattggacctctcaagaattgattgacacaattcaaaattttctacaacatctaggtattattgaggatatatatacaatatatatattagtgtcataacactcaattctaacactcaccacatcgttacattattaattcaaacaattcaagttgtgggacaaaatggatcccattattaatggaaattctgctaatgtttatctaaccgatagttatttaaaaggtgttatctctttctcagagtgtaatgctttaggaagttacatattcaatggtccttatctcaaaaatgattataccaacttaattagtagacaaaatccattaatagaacacatgaatctaaagaaactaaatataacacagtccttaatatctaagtatcataaaggtgaaataaaattagaagaacctacttattttcagtcattacttatgacatacaagagtatgacctcgtcagaacagattgctaccactaatttacttaaaaagataataagaagagctatagaaataagtgatgtcaaagtctatgctatattgaataaactagggcttaaagaaaaggacaagattaaatccaacaatggacaagatgaagacaactcagttattacgaccataatcaaagatgatatactttcagctgttaaagataatcaatctcatcttaaagcagacaaaaatcactctacaaaacaaaaagacacaatcaaaacaacactcttgaagaaattgatgtgttcaatgcaacatcctccatcatggttaatacattggtttaacttatacacaaaattaaacaacatattaacacagtatcgatcaaatgaggtaaaaaaccatgggtttacattgatagataatcaaactcttagtggatttcaatttattttgaaccaatatggttgtatagtttatcataaggaactcaaaagaattactgtgacaacctataatcaattcttgacatggaaagatattagccttagtagattaaatgtttgtttaattacatggattagtaactgcttgaacacattaaataaaagcttaggcttaagatgcggattcaataatgttatcttgacacaactattcctttatggagattgtatactaaagctatttcacaatgaggggttctacataataaaagaggtagagggatttattatgtctctaattttaaatataacagaagaagatcaattcagaaaacgattttataatagtatgctcaacaacatcacagatgctgctaataaagctcagaaaaatctgctatcaagagtatgtcatacattattagataagacagtgtccgataatataataaatggcagatggataattctattaagtaagttccttaaattaattaagcttgcaggtgacaataaccttaacaatctgagtgaactatattttttgttcagaatatttggacacccaatggtagatgaaagacaagccatggatgctgttaaaattaattgcaatgagaccaaattttacttgttaagcagtctgagtatgttaagaggtgcctttatatatagaattataaaagggtttgtaaataattacaacagatggcctactttaagaaatgctattgttttacccttaagatggttaacttactataaactaaacacttatccttctttgttggaacttacagaaagagatttgattgtgttatcaggactacgtttctatcgtgagtttcggttgcctaaaaaagtggatcttgaaatgattataaatgataaagctatatcacctcctaaaaatttgatatggactagtttccctagaaattacatgccatcacacatacaaaactatatagaacatgaaaaattaaaattttccgagagtgataaatcaagaagagtattagagtattatttaagagataacaaattcaatgaatgtgatttatacaactgtgtagttaatcaaagttatctcaacaaccctaatcatgtggtatcattgacaggcaaagaaagagaactcagtgtaggtagaatgtttgcaatgcaaccgggaatgttcagacaggttcaaatattggcagagaaaatgatagctgaaaacattttacaattctttcctgaaagtcttacaagatatggtgatctagaactacaaaaaatattagaattgaaagcaggaataagtaacaaatcaaatcgctacaatgataattacaacaattacattagtaagtgctctatcatcacagatctcagcaaattcaatcaagcatttcgatatgaaacgtcatgtatttgtagtgatgtgctggatgaactgcatggtgtacaatctctattttcctggttacatttaactattcctcatgtcacaataatatgcacatataggcatgcacccccctatataggagatcatattgtagatcttaacaatgtagatgaacaaagtggattatatagatatcacatgggtggcatcgaagggtggtgtcaaaaactgtggaccatagaagctatatcactattggatctaatatctctcaaagggaaattctcaattactgctttaattaatggtgacaatcaatcaatagatataagcaaaccaatcagactcatggaaggtcaaactcatgctcaagcagattatttgctagcattaaatagccttaaattactgtataaagagtatgcaggcataggccacaaattaaaaggaactgagacttatatatcacgagatatgcaatttatgagtaaaacaattcaacataacggtgtatattacccagctagtataaagaaagtcctaagagtgggaccgtggataaacactatacttgatgatttcaaagtgagtctagaatctataggtagtttgacacaagaattagaatatagaggtgaaagtctattatgcagtttaatatttagaaatgtatggttatataatcagattgctctacaattaaaaaatcatgcattatgtaacaataaactatatttggacatattaaaggttctgaaacacttaaaaaccttttttaatcttgataatattgatacagcattaacattgtatatgaatttacccatgttatttggtggtggtgatcccaacttgttatatcgaagtttctatagaagaactcctgacttcctcacagaggctatagttcactctgtgttcatacttagttattatacaaaccatgacttaaaagataaacttcaagatctgtcagatgatagattgaataagttcttaacatgcataatcacgtttgacaaaaaccctaatgctgaattcgtaacattgatgagagatcctcaagctttagggtctgagagacaagctaaaattactagcgaaatcaatagactggcagttacagaggttttgagtacagctccaaacaaaatattctccaaaagtgcacaacattatactactacagagatagatctaaatgatattatgcaaaatatagaacctacatatcctcatgggctaagagttgtttatgaaagtttacccttttataaagcagagaaaatagtaaatcttatatcaggtacaaaatctataactaacatactggaaaaaacttctgccatagacttaacagatattgatagagccactgagatgatgaggaaaaacataactttgcttataaggatacttccattggattgtaacagagataaaagagagatattgagtatggaaaacctaagtattactgaattaagcaaatatgttagggaaagatcttggtctttatccaatatagttggtgttacatcacccagtatcatgtatacaatggacatcaaatatactacaagcactatatctagtggcataattatagagaaatataatgttaacagtttaacacgtggtgagagaggacccactaaaccatgggttggttcatctacacaagagaaaaaaacaatgccagtttataatagacaagtcttaaccaaaaaacagagagatcaaatagatctattagcaaaattggattgggtgtatgcatctatagataacaaggatgaattcatggaagaactcagcataggaacccttgggttaacatatgaaaaggccaagaaattatttccacaatatttaagtgtcaattatttgcatcgccttacagtcagtagtagaccatgtgaattccctgcatcaataccagcttatagaacaacaaattatcactttgacactagccctattaatcgcatattaacagaaaagtatggtgatgaagatattgacatagtattccaaaactgtataagctttggccttagtttaatgtcagtagtagaacaatttactaatgtatgtcctaacagaattattctcatacctaagcttaatgagatacatttgatgaaacctcccatattcacaggtgatgttgatattcacaagttaaaacaagtgatacaaaaacagcatatgtttttaccagacaaaataagtttgactcaatatgtggaattattcttaagtaataaaacactcaaatctggatctcatgttaattctaatttaatattggcacataaaatatctgactattttcataatacttacattttaagtactaatttagctggacattggattctgattatacaacttatgaaagattctaaaggtatttttgaaaaagattggggagagggatatataactgatcatatgtttattaatttgaaagttttcttcaatgcttataagacctatctcttgtgttttcataaaggttatggcaaagcaaagctggagtgtgatatgaacacttcagatcttctatgtgtattggaattaatagacagtagttattggaagtctatgtctaaggtatttttagaacaaaaagttatcaaatacattcttagccaagatgcaagtttacatagagtaaaaggatgtcatagcttcaaattatggtttcttaaacgtcttaatgtagcagaattcacagtttgcccttgggttgttaacatagattatcatccaacacatatgaaagcaatattaacttatatagatcttgttagaatgggattgataaatatagatagaatacacattaaaaataaacacaaattcaatgatgaattttatacttctaatctcttctacattaattataacttctcagataatactcatctattaactaaacatataaggattgctaattctgaattagaaaataattacaacaaattatatcatcctacaccagaaaccctagagaatatactagccaatccgattaaaagtaatgacaaaaagacactgaatgactattgtataggtaaaaatgttgactcaataatgttaccattgttatctaataagaagcttattaaatcgtctgcaatgattagaaccaattacagcaaacaagatttgtataatttattccctatggttgtgattgatagaattatagatcattcaggcaatacagccaaatccaaccaactttacactactacttcccaccaaatatctttagtgcacaatagcacatcactttactgcatgcttccttggcatcatattaatagattcaattttgtatttagttctacaggttgtaaaattagtatagagtatattttaaaagatcttaaaattaaagatcccaattgtatagcattcataggtgaaggagcagggaatttattattgcgtacagtagtggaacttcatcctgacataagatatatttacagaagtctgaaagattgcaatgatcatagtttacctattgagtttttaaggctgtacaatggacatatcaacattgattatggtgaaaatttgaccattcctgctacagatgcaaccaacaacattcattggtcttatttacatataaagtttgctgaacctatcagtctttttgtctgtgatgccgaattgtctgtaacagtcaactggagtaaaattataatagaatggagcaagcatgtaagaaagtgcaagtactgttcctcagttaataaatgtatgttaatagtaaaatatcatgctcaagatgatattgatttcaaattagacaatataactatattaaaaacttatgtatgcttaggcagtaagttaaagggatcggaggtttacttagtccttacaataggtcctgcgaatatattcccagtatttaatgtagtacaaaatgctaaattgatactatcaagaaccaaaaatttcatcatgcctaagaaagctgataaagagtctattgatgcaaatattaaaagtttgataccctttctttgttaccctataacaaaaaaaggaattaatactgcattgtcaaaactaaagagtgttgttagtggagatatactatcatattctatagctggacgtaatgaagttttcagcaataaacttataaatcataagcatatgaacatcttaaaatggttcaatcatgttttaaatttcagatcaacagaactaaactataaccatttatatatggtagaatctacatatccttacctaagtgaattgttaaacagcttgacaaccaatgaacttaaaaaactgattaaaatcacaggtagtctgttatacaactttcataatgaataatgaataaagatcttataataaaaattcccatagctatacactaacactgtattcaattatagttattaaaaattaaaaatcgtacgattttttaaataacttttagtgaactaatcctaaagttatcattttaatcttggaggaataaatttaaaccctaatctaattggtttatatgtgtattaactaaattacgagatattagtttttgacactttttttctcgt

SEQ ID NO: 62 - protein, 1287 aa, Artificial Sequence
  Description of Artificial Sequence: Synthetic polypeptide
MFVFLVLLPLVSSQCVNLTTRTQLPPAYTNSFTRGVYYPDKVFRSSVLHSTQDLFLPFFSNVTWFHAIHVSGTNGTKRFANPVLPFNDGVYFASTEKSNIIRGWIFGTTLDSKTQSLLIVNNATNVVIKVCEFQFCNDPFLGVYYHKNNKSWMESEFRVYSSANNCTFEYVSQPFLMDLEGKQGNFKNLREFVFKNIDGYFKIYSKHTPINLVRGLPQGFSALEPLVDLPIGINITRFQTLHRSYLTPGDSSSGWTAGAAAYYVGYLQPRTFLLKYNENGTITDAVDCALDPLSETKCTLKSFTVEKGIYQTSNFRVQPTESIVRFPNITNLCPFGEVFNATRFASVYAWNRKRISNCVADYSVLYNSASFSTFKCYGVSPTKLNDLCFTNVYADSFVIRGDEVRQIAPGQTGNIADYNYKLPDDFTGCVIAWNSNNLDSKVGGNYNYLYRLFRKSNLKPFERDISTEIYQAGSTPCNGVKGFNCYFPLQSYGFQPTYGVGYQPYRVVVLSFELLHAPATVCGPKKSTNLVKNKCVNFNFNGLTGTGVLTESNKKFLPFQQFGRDIADTTDAVRDPQTLEILDITPCSFGGVSVITPGTNTSNQVAVLYQGVNCTEVPVAIHADQLTPTWRVYSTGSNVFQTRAGCLIGAEHVNNSYECDIPIGAGICASYQTQTNSPRRARSVASQSIIAYTMSLGVENSVAYSNNSIAIPTNFTISVTTEILPVSMTKTSVDCTMYICGDSTECSNLLLQYGSFCTQLNRALTGIAVEQDKNTQEVFAQVKQIYKTPPIKDFGGFNFSQILPDPSKPSKRSFIEDLLFNKVTLADAGFIKQYGDCLGDIAARDLICAQKFNGLTVLPPLLTDEMIAQYTSALLAGTITSGWTFGAGAALQIPFAMQMAYRFNGIGVTQNVLYENQKLIANQFNSAIGKIQDSLSSTASALGKLQDVVNQNAQALNTLVKQLSSNFGAISSVLNDILSRLDKVEAEVQIDRLITGRLQSLQTYVTQQLIRAAEIRASANLAATKMSECVLGQSKRVDFCGKGYHLMSFPQSAPHGVVFLHVTYVPAQEKNFTTAPAICHDGKAHFPREGVFVSNGTHWFVTQRNFYEPQIITTDNTFVSGNCDVVIGIVNNTVYDPLQPELDSFKEELDKYFKNHTSPDVDLGDISGINASVVNIQKEIDRLNEVAKNLNESLIDLQELGKYEQYIKWPWYIWLGFIAGLIAIVMVTIMLCCMTSCCSCLKGCCSCGSCCKFDEDDGLLLYCKARSTPITLSKDQLSGINNIAFSN

SEQ ID NO: 63 - DNA, 3864 bp, Artificial Sequence
  Description of Artificial Sequence: Synthetic polynucleotide
atgtttgtttttcttgttttattgccactagtctctagtcagtgtgttaatcttacaaccagaactcaattaccccctgcatacactaattctttcacacgtggtgtttattaccctgacaaagttttcagatcctcagttttacattcaactcaggacttgttcttacctttcttttccaatgttacttggttccatgctatacatgtctctgggaccaatggtactaagaggtttgctaaccctgtcctaccatttaatgatggtgtttattttgcttccactgagaagtctaacataataagaggctggatttttggtactactttagattcgaagacccagtccctacttattgttaataacgctactaatgttgttattaaagtctgtgaatttcaattttgtaatgatccatttttgggtgtttattaccacaaaaacaacaaaagttggatggaaagtgagttcagagtttattctagtgcgaataattgcacttttgaatatgtctctcagccttttcttatggaccttgaaggaaaacagggtaatttcaaaaatcttagggaatttgtgtttaagaatattgatggttattttaaaatatattctaagcacacgcctattaatttagtgcgtggtctccctcagggtttttcggctttagaaccattggtagatttgccaataggtattaacatcactaggtttcaaactttacatagaagttatttgactcctggtgattcttcttcaggttggacagctggtgctgcagcttattatgtgggttatcttcaacctaggacttttctattaaaatataatgaaaatggaaccattacagatgctgtagactgtgcacttgaccctctctcagaaacaaagtgtacgttgaaatccttcactgtagaaaaaggaatctatcaaacttctaactttagagtccaaccaacagaatctattgttagatttcctaatattacaaacttgtgcccttttggtgaagtttttaacgccaccagatttgcatctgtttatgcttggaacaggaagagaatcagcaactgtgttgctgattattctgtcctatataattccgcatcattttccacttttaagtgttatggagtgtctcctactaaattaaatgatctctgctttactaatgtctatgcagattcatttgtaattagaggtgatgaagtcagacaaatcgctccagggcaaactggaaatattgctgattataattataaattaccagatgattttacaggctgcgttatagcttggaattctaacaatcttgattctaaggttggtggtaattataattacctgtatagattgtttaggaagtctaatctcaaaccttttgagagagatatttcaactgaaatctatcaggccggtagcacaccttgtaatggtgttaaaggttttaattgttactttcctttacaatcatatggtttccaacccacttatggtgttggttaccaaccatacagagtagtagtactttcttttgaacttctacatgcaccagcaactgtttgtggacctaaaaagtctactaatttggttaaaaacaaatgtgtcaatttcaacttcaatggtttaacaggcacaggtgttcttactgagtctaacaaaaagtttctgcctttccaacaatttggcagagacattgctgacactactgatgctgtccgtgatccacagacacttgagattcttgacattacaccatgttcttttggtggtgtcagtgttataacaccaggaacaaatacttctaaccaggttgctgttctttatcagggtgttaactgcacagaagtccctgttgctattcatgcagatcaacttactcctacttggcgtgtttattctacaggttctaatgtttttcaaacacgtgcaggctgtttaataggggctgaacatgtcaacaactcatatgagtgtgacatacccattggtgcaggtatatgcgctagttatcagactcagactaattctcctcggcgggcacgtagtgtagctagtcaatccatcattgcctacactatgtcacttggtgtagaaaattcagttgcttactctaataactctattgccatacccacaaattttactattagtgttaccacagaaattctaccagtgtctatgaccaagacatcagtagattgtacaatgtacatttgtggtgattcaactgaatgcagcaatcttttgttgcaatatggcagtttttgtacacaattaaaccgtgctttaactggaatagctgttgaacaagacaaaaacacccaagaagtttttgcacaagtcaaacaaatttacaaaacaccaccaattaaagattttggtggttttaatttttcacaaatattaccagatccatcaaaaccaagcaagaggtcatttattgaagatctacttttcaacaaagtgacacttgcagatgctggcttcatcaaacaatatggtgattgccttggtgatattgctgctagagacctcatttgtgcacaaaagtttaacggccttactgttttgccacctttgctcacagatgaaatgattgctcaatacacttctgcactgttagcgggtacaatcacttctggttggacctttggtgcaggtgctgcattacaaataccatttgctatgcaaatggcttataggtttaatggtattggagttacacagaatgttctctatgagaaccaaaaattgattgccaaccaatttaatagtgctattggcaaaattcaagactcactttcttccacagcaagtgcacttggaaaacttcaagatgtggtcaaccaaaatgcacaagctttaaacacgcttgttaaacaacttagctccaattttggtgcaatttcaagtgttttaaatgatatcctttcacgtcttgacaaagttgaggctgaagtgcaaattgataggttgatcacaggcagacttcaaagtttgcagacatatgtgactcaacaattaattagagctgcagaaatcagagcttctgctaatcttgctgctactaaaatgtcagagtgtgtacttggacaatcaaaaagagttgatttttgtggaaagggctatcatcttatgtccttccctcagtcagcacctcatggtgtagtcttcttgcatgtgacttatgtccctgcacaagaaaagaacttcacaactgctcctgccatttgtcatgatggaaaagcacactttcctcgtgaaggtgtctttgtttcaaatggcacacactggtttgtaacacaaaggaatttttatgaaccacaaatcattactacagacaacacatttgtgtctggtaactgtgatgttgtaataggaattgtcaacaacacagtttatgatcctttgcaacctgaattagactcattcaaggaggagttagataaatattttaagaatcatacatcaccagatgttgatttaggtgacatctctggcattaatgcttcagttgtaaacattcaaaaagaaattgaccgcctcaatgaggttgccaagaatttaaatgaatctctcatcgatctccaagaacttggaaagtatgagcagtatataaaatggccatggtacatttggctaggttttatagctggcttgattgccatagtaatggtgacaattatgctttgctgtatgaccagttgctgtagttgtctcaagggctgttgttcttgtggatcctgctgcaaatttgatgaagacgacggactgctcctatactgtaaggccagaagcacaccaatcacactaagcaaggatcaactgagtggtataaataatattgcatttagtaactaa

SEQ ID NO: 64 - DNA, 16740 bp, Artificial Sequence
  Description of Artificial Sequence: Synthetic polynucleotide
acgcgaaaaaatgcgtacaacaaacttgcataaaccaaaaaaatggggcaaataagaatttgataagtaccacttaaatttaactcccttgcttagcgatggtgagcgagctgattaaggagaacatgcacatgaagctgtacatggagggcaccgtgaacaaccaccacttcaagtgcacatccgagggcgaaggcaagccctacgagggcacccagaccatgagaatcaaggcggtcgagggcggccctctccccttcgccttcgacatcctggctaccagcttcatgtacggcagcaaaaccttcatcaaccacacccagggcatccccgacttctttaagcagtccttccccgagggcttcacatgggagagagtcaccacatacgaagacgggggcgtgctgaccgctacccaggacaccagcctccaggacggctgcctcatctacaacgtcaagatcagaggggtgaacttcccatccaacggccctgtgatgcagaagaaaacactcggctgggaggcctccaccgagaccctgtaccccgctgacggcggcctggaaggcagagccgacatggccctgaagctcgtgggcgggggccacctgatctgcaacttgaagaccacatacagatccaagaaacccgctaagaacctcaagatgcccggcgtctactatgtggacagaagactggaaagaatcaaggaggccgacaaagagacctacgtcgagcagcacgaggtggctgtggccagatactgcgacctccctagcaaactggggcacagatgagtattcaattatagttattaaaaacttaacagaagacaaaaatggggcaaataagaatttgataagtaccacttaaatttaactcccttgcttagcgatgggttcgaattcgctatcgatgataaaagtacgtctacaaaatctatttgataatgatgaagtagcgctactaaaaataacgtgttatacggataaactaatacatctaacgaatgcgctagcgaaagcggtaatacatacgataaaactaaatggtatagtatttgtacatgtaataacgtcgtcggatatatgtccgaataataatatagtagtaaaatcgaattttacgacgatgccggtactacaaaatggtggttatatatgggaaatgatggaactaacgcattgttcgcaaccgaatggtctactagatgataattgtgaaataaaattttcgaaaaaactatcggattcgacgatgacgaattatatgaatcaactatcggaactactaggttttgatctaaatccgtaaattataattaatatcaactagcaaatcaatgtcactaacaccattagttaatataaaacttaacagaagacaaaaatggggcaaataaatcaattcagccaacccaaccatggatacgacgcataatgataatacgccgcaacgtctaatgataacggatatgcgtccgctatcgctagaaacgataataacgtcgctaacgcgtgatataataacgcataaatttatatatctaataaatcatgaatgtatagtacgtaaactagatgaacgtcaagcgacgtttacgtttctagtaaattatgaaatgaaactactacataaagtaggttcgacgaaatataaaaaatatacggaatataatacgaaatatggtacgtttccgatgccgatatttataaatcatgatggttttctagaatgtataggtataaaaccgacgaaacatacgccgataatatataaatatgatctaaatccgtaaatttcaacacaatattcacacaatctaaaacaacaactctatgcataactatactccatagtccagatggagcctgaaaattatagtaatttaaaattaaggagagatataagatagaagatggggcaaatacaaagatggctcttagcaaagtcaagttgaatgatacactcaacaaagatcaacttctgtcatccagcaaatacaccatccaacggagcacaggagatagtattgatactcctaattatgatgtgcagaaacacatcaataagttatgtggcatgttattaatcacagaagatgctaatcataaattcactgggttaataggtatgttatatgcgatgtctaggttaggaagagaagacaccataaaaatactcagagatgcgggatatcatgtaaaagcaaatggagtagatgtaacaacacatcgtcaagacattaatggaaaagaaatgaaatttgaagtgttaacattggcaagcttaacaactgaaattcaaatcaacattgagatagaatctagaaaatcctacaaaaaaatgctaaaagaaatgggagaggtagctccagaatacaggcatgactctcctgattgtgggatgataatattatgtatagcagcattagtaataactaaattagcagcaggggacagatctggtcttacagccgtgattaggagagctaataatgtcctaaaaaatgaaatgaaacgttacaaaggcttactacccaaggacatagccaacagcttctatgaagtgtttgaaaaacatccccactttatagatgtttttgttcattttggtatagcacaatcttctaccagaggtggcagtagagttgaagggatttttgcaggattgtttatgaatgcctatggtgcagggcaagtgatgttacggtggggagtcttagcaaaatcagttaaaaatattatgttaggacatgctagtgtgcaagcagaaatggaacaagttgttgaggtttatgaatatgcccaaaaattgggtggtgaagcaggattctaccatatattgaacaacccaaaagcatcattattatctttgactcaatttcctcacttctccagtgtagtattaggcaatgctgctggcctaggcataatgggagagtacagaggtacaccgaggaatcaagatctatatgatgcagcaaaggcatatgctgaacaactcaaagaaaatggtgtgattaactacagtgtactagacttgacagcagaagaactagaggctatcaaacatcagcttaatccaaaagataatgatgtagagctttgagttaataaaaaatggggcaaataaatcatcatggaaaagtttgctcctgaattccatggagaagatgcaaacaacagggctactaaattcctagaatcaataaagggcaaattcacatcacccaaagatcccaagaaaaaagatagtatcatatctgtcaactcaatagatatagaagtaaccaaagaaagccctataacatcaaattcaactattatcaacccaacaaatgagacagatgatactgcagggaacaagcccaattatcaaagaaaacctctagtaagtttcaaagaagaccctacaccaagtgataatcccttttctaaactatacaaagaaaccatagaaacatttgataacaatgaagaagaatccagctattcatacgaagaaataaatgatcagacaaacgataatataacagcaagattagataggattgatgaaaaattaagtgaaatactaggaatgcttcacacattagtagtggcaagtgcaggacctacatctgctcgggatggtataagagatgccatgattggtttaagagaagaaatgatagaaaaaatcagaactgaagcattaatgaccaatgacagattagaagctatggcaagactcaggaatgaggaaagtgaaaagatggcaaaagacacatcagatgaagtgtctctcaatccaacatcagagaaattgaacaacctattggaagggaatgatagtgacaatgatctatcacttgaagatttctgattagttaccactcttcacatcaacacacaataccaacagaagaccaacaaactaaccaacccaatcatccaaccaaacatccatccgccaatcagccaaacagccaacaaaacaaccagccaatccaaaactaaccacccggaaaaaatctataatatagttacaaaaaaaggaaagggtggggcaaatatggaaacatacgtgaacaagcttcacgaaggctccacatacacagctgctgttcaatacaatgtcttagaaaaagacgatgaccctgcatcacttacaatatgggtgcccatgttccaatcatctatgccagcagatttacttataaaagaactagctaatgtcaacatactagtgaaacaaatatccacacccaagggaccttcactaagagtcatgataaactcaagaagtgcagtgctagcacaaatgcccagcaaatttaccatatgcgctaatgtgtccttggatgaaagaagcaaactagcatatgatgtaaccacaccctgtgaaatcaaggcatgtagtctaacatgcctaaaatcaaaaaatatgttgactacagttaaagatctcactatgaagacactcaaccctacacatgatattattgctttatgtgaatttgaaaacatagtaacatcaaaaaaagtcataataccaacatacctaagatccatcagtgtcagaaataaagatctgaacacacttgaaaatataacaaccactgaattcaaaaatgctatcacaaatgcaaaaatcatcccttactcaggattactattagtcatcacagtgactgacaacaaaggagcattcaaatacataaagccacaaagtcaattcatagtagatcttggagcttacctagaaaaagaaagtatatattatgttaccacaaattggaagcacacagctacacgatttgcaatcaaacccatggaagattaacctttttcctctacatcagtgtgttaattcatacaaactttctacctacattcttcacttcaccatcacaatcacaaacactctgtggttcaaccaatcaaacaaaacttatctgaagtcccagatcatcccaagtcattgtttatcagatctagtactcaaataagttaataaaaaatatacacatggacgtccatggggcaaatgcaaacatgtttgtttttcttgttttattgccactagtctctagtcagtgtgttaatcttacaaccagaactcaattaccccctgcatacactaattctttcacacgtggtgtttattaccctgacaaagttttcagatcctcagttttacattcaactcaggacttgttcttacctttcttttccaatgttacttggttccatgctatacatgtctctgggaccaatggtactaagaggtttgctaaccctgtcctaccatttaatgatggtgtttattttgcttccactgagaagtctaacataataagaggctggatttttggtactactttagattcgaagacccagtccctacttattgttaataacgctactaatgttgttattaaagtctgtgaatttcaattttgtaatgatccatttttgggtgtttattaccacaaaaacaacaaaagttggatggaaagtgagttcagagtttattctagtgcgaataattgcacttttgaatatgtctctcagccttttcttatggaccttgaaggaaaacagggtaatttcaaaaatcttagggaatttgtgtttaagaatattgatggttattttaaaatatattctaagcacacgcctattaatttagtgcgtggtctccctcagggtttttcggctttagaaccattggtagatttgccaataggtattaacatcactaggtttcaaactttacatagaagttatttgactcctggtgattcttcttcaggttggacagctggtgctgcagcttattatgtgggttatcttcaacctaggacttttctattaaaatataatgaaaatggaaccattacagatgctgtagactgtgcacttgaccctctctcagaaacaaagtgtacgttgaaatccttcactgtagaaaaaggaatctatcaaacttctaactttagagtccaaccaacagaatctattgttagatttcctaatattacaaacttgtgcccttttggtgaagtttttaacgccaccagatttgcatctgtttatgcttggaacaggaagagaatcagcaactgtgttgctgattattctgtcctatataattccgcatcattttccacttttaagtgttatggagtgtctcctactaaattaaatgatctctgctttactaatgtctatgcagattcatttgtaattagaggtgatgaagtcagacaaatcgctccagggcaaactggaaatattgctgattataattataaattaccagatgattttacaggctgcgttatagcttggaattctaacaatcttgattctaaggttggtggtaattataattacctgtatagattgtttaggaagtctaatctcaaaccttttgagagagatatttcaactgaaatctatcaggccggtagcacaccttgtaatggtgttaaaggttttaattgttactttcctttacaatcatatggtttccaacccacttatggtgttggttaccaaccatacagagtagtagtactttcttttgaacttctacatgcaccagcaactgtttgtggacctaaaaagtctactaatttggttaaaaacaaatgtgtcaatttcaacttcaatggtttaacaggcacaggtgttcttactgagtctaacaaaaagtttctgcctttccaacaatttggcagagacattgctgacactactgatgctgtccgtgatccacagacacttgagattcttgacattacaccatgttcttttggtggtgtcagtgttataacaccaggaacaaatacttctaaccaggttgctgttctttatcagggtgttaactgcacagaagtccctgttgctattcatgcagatcaacttactcctacttggcgtgtttattctacaggttctaatgtttttcaaacacgtgcaggctgtttaataggggctgaacatgtcaacaactcatatgagtgtgacatacccattggtgcaggtatatgcgctagttatcagactcagactaattctcctcggcgggcacgtagtgtagctagtcaatccatcattgcctacactatgtcacttggtgtagaaaattcagttgcttactctaataactctattgccatacccacaaattttactattagtgttaccacagaaattctaccagtgtctatgaccaagacatcagtagattgtacaatgtacatttgtggtgattcaactgaatgcagcaatcttttgttgcaatatggcagtttttgtacacaattaaaccgtgctttaactggaatagctgttgaacaagacaaaaacacccaagaagtttttgcacaagtcaaacaaatttacaaaacaccaccaattaaagattttggtggttttaatttttcacaaatattaccagatccatcaaaaccaagcaagaggtcatttattgaagatctacttttcaacaaagtgacacttgcagatgctggcttcatcaaacaatatggtgattgccttggtgatattgctgctagagacctcatttgtgcacaaaagtttaacggccttactgttttgccacctttgctcacagatgaaatgattgctcaatacacttctgcactgttagcgggtacaatcacttctggttggacctttggtgcaggtgctgcattacaaataccatttgctatgcaaatggcttataggtttaatggtattggagttacacagaatgttctctatgagaaccaaaaattgattgccaaccaatttaatagtgctattggcaaaattcaagactcactttcttccacagcaagtgcacttggaaaacttcaagatgtggtcaaccaaaatgcacaagctttaaacacgcttgttaaacaacttagctccaattttggtgcaatttcaagtgttttaaatgatatcctttcacgtcttgacaaagttgaggctgaagtgcaaattgataggttgatcacaggcagacttcaaagtttgcagacatatgtgactcaacaattaattagagctgcagaaatcagagcttctgctaatcttgctgctactaaaatgtcagagtgtgtacttggacaatcaaaaagagttgatttttgtggaaagggctatcatcttatgtccttccctcagtcagcacctcatggtgtagtcttcttgcatgtgacttatgtccctgcacaagaaaagaacttcacaactgctcctgccatttgtcatgatggaaaagcacactttcctcgtgaaggtgtctttgtttcaaatggcacacactggtttgtaacacaaaggaatttttatgaaccacaaatcattactacagacaacacatttgtgtctggtaactgtgatgttgtaataggaattgtcaacaacacagtttatgatcctttgcaacctgaattagactcattcaaggaggagttagataaatattttaagaatcatacatcaccagatgttgatttaggtgacatctctggcattaatgcttcagttgtaaacattcaaaaagaaattgaccgcctcaatgaggttgccaagaatttaaatgaatctctcatcgatctccaagaacttggaaagtatgagcagtatataaaatggccatggtacatttggctaggttttatagctggcttgattgccatagtaatggtgacaattatgctttgctgtatgaccagttgctgtagttgtctcaagggctgttgttcttgtggatcctgctgcaaatttgatgaagacgacggactgctcctatactgtaaggccagaagcacaccaatcacactaagcaaggatcaactgagtggtataaataatattgcatttagtaactaaataaaaatagcacctaatcatgttcttacaatggtttactatctgctcatagacaacccatctatcattggattttcttaaaatctgaacttcatcgaaactcttatctataaaccatctcacttacactatttaagtagattcctagtttatagttatataaaacacaattgaatgccagtcgaccttaccatctgtaaaaatgaaaactggggcaaatatgtcacgaaggaatccttgcaaatttgaaattcgaggtcattgcttaaatggtaagaggtgtcattttagtcataattattttgaatggccaccccatgcactgcttgtaagacaaaactttatgttaaacagaatacttaagtctatggataaaagtatagataccttatcagaaataagtggagctgcagagttggacagaacagaagagtatgctcttggtgtagttggagtgctagagagttatataggatcaataaacaatataactaaacaatcagcatgtgttgccatgagcaaactcctcactgaactcaatagtgatgatatcaaaaagctgagggacaatgaagagctaaattcacccaagataagagtgtacaatactgtcatatcatatattgaaagcaacaggaaaaacaataaacaaactatccatctgttaaaaagattgccagcagacgtattgaagaaaaccatcaaaaacacattggatatccataagagcataaccatcaacaacccaaaagaatcaactgttagtgatacaaatgaccatgccaaaaataatgatactacctgacaaatatccttgtagtataacttccatactaataacaagtagatgtagagttactatgtataatcaaaagaacacactatatttcaatcaaaacaacccaaataaccatatgtactcaccgaatcaaacattcaatgaaatccattggacctctcaagaattgattgacacaattcaaaattttctacaacatctaggtattattgaggatatatatacaatatatatattagtgtcataacactcaattctaacactcaccacatcgttacattattaattcaaacaattcaagttgtgggacaaaatggatcccattattaatggaaattctgctaatgtttatctaaccgatagttatttaaaaggtgttatctctttctcagagtgtaatgctttaggaagttacatattcaatggtccttatctcaaaaatgattataccaacttaattagtagacaaaatccattaatagaacacatgaatctaaagaaactaaatataacacagtccttaatatctaagtatcataaaggtgaaataaaattagaagaacctacttattttcagtcattacttatgacatacaagagtatgacctcgtcagaacagattgctaccactaatttacttaaaaagataataagaagagctatagaaataagtgatgtcaaagtctatgctatattgaataaactagggcttaaagaaaaggacaagattaaatccaacaatggacaagatgaagacaactcagttattacgaccataatcaaagatgatatactttcagctgttaaagataatcaatctcatcttaaagcagacaaaaatcactctacaaaacaaaaagacacaatcaaaacaacactcttgaagaaattgatgtgttcaatgcaacatcctccatcatggttaatacattggtttaacttatacacaaaattaaacaacatattaacacagtatcgatcaaatgaggtaaaaaaccatgggtttacattgatagataatcaaactcttagtggatttcaatttattttgaaccaatatggttgtatagtttatcataaggaactcaaaagaattactgtgacaacctataatcaattcttgacatggaaagatattagccttagtagattaaatgtttgtttaattacatggattagtaactgcttgaacacattaaataaaagcttaggcttaagatgcggattcaataatgttatcttgacacaactattcctttatggagattgtatactaaagctatttcacaatgaggggttctacataataaaagaggtagagggatttattatgtctctaattttaaatataacagaagaagatcaattcagaaaacgattttataatagtatgctcaacaacatcacagatgctgctaataaagctcagaaaaatctgctatcaagagtatgtcatacattattagataagacagtgtccgataatataataaatggcagatggataattctattaagtaagttccttaaattaattaagcttgcaggtgacaataaccttaacaatctgagtgaactatattttttgttcagaatatttggacacccaatggtagatgaaagacaagccatggatgctgttaaaattaattgcaatgagaccaaattttacttgttaagcagtctgagtatgttaagaggtgcctttatatatagaattataaaagggtttgtaaataattacaacagatggcctactttaagaaatgctattgttttacccttaagatggttaacttactataaactaaacacttatccttctttgttggaacttacagaaagagatttgattgtgttatcaggactacgtttctatcgtgagtttcggttgcctaaaaaagtggatcttgaaatgattataaatgataaagctatatcacctcctaaaaatttgatatggactagtttccctagaaattacatgccatcacacatacaaaactatatagaacatgaaaaattaaaattttccgagagtgataaatcaagaagagtattagagtattatttaagagataacaaattcaatgaatgtgatttatacaactgtgtagttaatcaaagttatctcaacaaccctaatcatgtggtatcattgacaggcaaagaaagagaactcagtgtaggtagaatgtttgcaatgcaaccgggaatgttcagacaggttcaaatattggcagagaaaatgatagctgaaaacattttacaattctttcctgaaagtcttacaagatatggtgatctagaactacaaaaaatattagaattgaaagcaggaataagtaacaaatcaaatcgctacaatgataattacaacaattacattagtaagtgctctatcatcacagatctcagcaaattcaatcaagcatttcgatatgaaacgtcatgtatttgtagtgatgtgctggatgaactgcatggtgtacaatctctattttcctggttacatttaactattcctcatgtcacaataatatgcacatataggcatgcacccccctatataggagatcatattgtagatcttaacaatgtagatgaacaaagtggattatatagatatcacatgggtggcatcgaagggtggtgtcaaaaactgtggaccatagaagctatatcactattggatctaatatctctcaaagggaaattctcaattactgctttaattaatggtgacaatcaatcaatagatataagcaaaccaatcagactcatggaaggtcaaactcatgctcaagcagattatttgctagcattaaatagccttaaattactgtataaagagtatgcaggcataggccacaaattaaaaggaactgagacttatatatcacgagatatgcaatttatgagtaaaacaattcaacataacggtgtatattacccagctagtataaagaaagtcctaagagtgggaccgtggataaacactatacttgatgatttcaaagtgagtctagaatctataggtagtttgacacaagaattagaatatagaggtgaaagtctattatgcagtttaatatttagaaatgtatggttatataatcagattgctctacaattaaaaaatcatgcattatgtaacaataaactatatttggacatattaaaggttctgaaacacttaaaaaccttttttaatcttgataatattgatacagcattaacattgtatatgaatttacccatgttatttggtggtggtgatcccaacttgttatatcgaagtttctatagaagaactcctgacttcctcacagaggctatagttcactctgtgttcatacttagttattatacaaaccatgacttaaaagataaacttcaagatctgtcagatgatagattgaataagttcttaacatgcataatcacgtttgacaaaaaccctaatgctgaattcgtaacattgatgagagatcctcaagctttagggtctgagagacaagctaaaattactagcgaaatcaatagactggcagttacagaggttttgagtacagctccaaacaaaatattctccaaaagtgcacaacattatactactacagagatagatctaaatgatattatgcaaaatatagaacctacatatcctcatgggctaagagttgtttatgaaagtttacccttttataaagcagagaaaatagtaaatcttatatcaggtacaaaatctataactaacatactggaaaaaacttctgccatagacttaacagatattgatagagccactgagatgatgaggaaaaacataactttgcttataaggatacttccattggattgtaacagagataaaagagagatattgagtatggaaaacctaagtattactgaattaagcaaatatgttagggaaagatcttggtctttatccaatatagttggtgttacatcacccagtatcatgtatacaatggacatcaaatatactacaagcactatatctagtggcataattatagagaaatataatgttaacagtttaacacgtggtgagagaggacccactaaaccatgggttggttcatctacacaagagaaaaaaacaatgccagtttataatagacaagtcttaaccaaaaaacagagagatcaaatagatctattagcaaaattggattgggtgtatgcatctatagataacaaggatgaattcatggaagaactcagcataggaacccttgggttaacatatgaaaaggccaagaaattatttccacaatatttaagtgtcaattatttgcatcgccttacagtcagtagtagaccatgtgaattccctgcatcaataccagcttatagaacaacaaattatcactttgacactagccctattaatcgcatattaacagaaaagtatggtgatgaagatattgacatagtattccaaaactgtataagctttggccttagtttaatgtcagtagtagaacaatttactaatgtatgtcctaacagaattattctcatacctaagcttaatgagatacatttgatgaaacctcccatattcacaggtgatgttgatattcacaagttaaaacaagtgatacaaaaacagcatatgtttttaccagacaaaataagtttgactcaatatgtggaattattcttaagtaataaaacactcaaatctggatctcatgttaattctaatttaatattggcacataaaatatctgactattttcataatacttacattttaagtactaatttagctggacattggattctgattatacaacttatgaaagattctaaaggtatttttgaaaaagattggggagagggatatataactgatcatatgtttattaatttgaaagttttcttcaatgcttataagacctatctcttgtgttttcataaaggttatggcaaagcaaagctggagtgtgatatgaacacttcagatcttctatgtgtattggaattaatagacagtagttattggaagtctatgtctaaggtatttttagaacaaaaagttatcaaatacattcttagccaagatgcaagtttacatagagtaaaaggatgtcatagcttcaaattatggtttcttaaacgtcttaatgtagcagaattcacagtttgcccttgggttgttaacatagattatcatccaacacatatgaaagcaatattaacttatatagatcttgttagaatgggattgataaatatagatagaatacacattaaaaataaacacaaattcaatgatgaattttatacttctaatctcttctacattaattataacttctcagataatactcatctattaactaaacatataaggattgctaattctgaattagaaaataattacaacaaattatatcatcctacaccagaaaccctagagaatatactagccaatccgattaaaagtaatgacaaaaagacactgaatgactattgtataggtaaaaatgttgactcaataatgttaccattgttatctaataagaagcttattaaatcgtctgcaatgattagaaccaattacagcaaacaagatttgtataatttattccctatggttgtgattgatagaattatagatcattcaggcaatacagccaaatccaaccaactttacactactacttcccaccaaatatctttagtgcacaatagcacatcactttactgcatgcttccttggcatcatattaatagattcaattttgtatttagttctacaggttgtaaaattagtatagagtatattttaaaagatcttaaaattaaagatcccaattgtatagcattcataggtgaaggagcagggaatttattattgcgtacagtagtggaacttcatcctgacataagatatatttacagaagtctgaaagattgcaatgatcatagtttacctattgagtttttaaggctgtacaatggacatatcaacattgattatggtgaaaatttgaccattcctgctacagatgcaaccaacaacattcattggtcttatttacatataaagtttgctgaacctatcagtctttttgtctgtgatgccgaattgtctgtaacagtcaactggagtaaaattataatagaatggagcaagcatgtaagaaagtgcaagtactgttcctcagttaataaatgtatgttaatagtaaaatatcatgctcaagatgatattgatttcaaattagacaatataactatattaaaaacttatgtatgcttaggcagtaagttaaagggatcggaggtttacttagtccttacaataggtcctgcgaatatattcccagtatttaatgtagtacaaaatgctaaattgatactatcaagaaccaaaaatttcatcatgcctaagaaagctgataaagagtctattgatgcaaatattaaaagtttgataccctttctttgttaccctataacaaaaaaaggaattaatactgcattgtcaaaactaaagagtgttgttagtggagatatactatcatattctatagctggacgtaatgaagttttcagcaataaacttataaatcataagcatatgaacatcttaaaatggttcaatcatgttttaaatttcagatcaacagaactaaactataaccatttatatatggtagaatctacatatccttacctaagtgaattgttaaacagcttgacaaccaatgaacttaaaaaactgattaaaatcacaggtagtctgttatacaactttcataatgaataatgaataaagatcttataataaaaattcccatagctatacactaacactgtattcaattatagttattaaaaattaaaaatcgtacgattttttaaataacttttagtgaactaatcctaaagttatcattttaatcttggaggaataaatttaaaccctaatctaattggtttatatgtgtattaactaaattacgagatattagtttttgacactttttttctcgt

SEQ ID NO: 65 - DNA, 15944 bp, Artificial Sequence
  Description of Artificial Sequence: Synthetic polynucleotide
acgcgaaaaaatgcgtacaacaaacttgcataaaccaaaaaaatggggcaaataagaatttgataagtaccacttaaatttaactcccttgcttagcgatgggttcgaattcgctatcgatgataaaagtacgtctacaaaatctatttgataatgatgaagtagcgctactaaaaataacgtgttatacggataaactaatacatctaacgaatgcgctagcgaaagcggtaatacatacgataaaactaaatggtatagtatttgtacatgtaataacgtcgtcggatatatgtccgaataataatatagtagtaaaatcgaattttacgacgatgccggtactacaaaatggtggttatatatgggaaatgatggaactaacgcattgttcgcaaccgaatggtctactagatgataattgtgaaataaaattttcgaaaaaactatcggattcgacgatgacgaattatatgaatcaactatcggaactactaggttttgatctaaatccgtaaattataattaatatcaactagcaaatcaatgtcactaacaccattagttaatataaaacttaacagaagacaaaaatggggcaaataaatcaattcagccaacccaaccatggatacgacgcataatgataatacgccgcaacgtctaatgataacggatatgcgtccgctatcgctagaaacgataataacgtcgctaacgcgtgatataataacgcataaatttatatatctaataaatcatgaatgtatagtacgtaaactagatgaacgtcaagcgacgtttacgtttctagtaaattatgaaatgaaactactacataaagtaggttcgacgaaatataaaaaatatacggaatataatacgaaatatggtacgtttccgatgccgatatttataaatcatgatggttttctagaatgtataggtataaaaccgacgaaacatacgccgataatatataaatatgatctaaatccgtaaatttcaacacaatattcacacaatctaaaacaacaactctatgcataactatactccatagtccagatggagcctgaaaattatagtaatttaaaattaaggagagatataagatagaagatggggcaaatacaaagatggctcttagcaaagtcaagttgaatgatacactcaacaaagatcaacttctgtcatccagcaaatacaccatccaacggagcacaggagatagtattgatactcctaattatgatgtgcagaaacacatcaataagttatgtggcatgttattaatcacagaagatgctaatcataaattcactgggttaataggtatgttatatgcgatgtctaggttaggaagagaagacaccataaaaatactcagagatgcgggatatcatgtaaaagcaaatggagtagatgtaacaacacatcgtcaagacattaatggaaaagaaatgaaatttgaagtgttaacattggcaagcttaacaactgaaattcaaatcaacattgagatagaatctagaaaatcctacaaaaaaatgctaaaagaaatgggagaggtagctccagaatacaggcatgactctcctgattgtgggatgataatattatgtatagcagcattagtaataactaaattagcagcaggggacagatctggtcttacagccgtgattaggagagctaataatgtcctaaaaaatgaaatgaaacgttacaaaggcttactacccaaggacatagccaacagcttctatgaagtgtttgaaaaacatccccactttatagatgtttttgttcattttggtatagcacaatcttctaccagaggtggcagtagagttgaagggatttttgcaggattgtttatgaatgcctatggtgcagggcaagtgatgttacggtggggagtcttagcaaaatcagttaaaaatattatgttaggacatgctagtgtgcaagcagaaatggaacaagttgttgaggtttatgaatatgcccaaaaattgggtggtgaagcaggattctaccatatattgaacaacccaaaagcatcattattatctttgactcaatttcctcacttctccagtgtagtattaggcaatgctgctggcctaggcataatgggagagtacagaggtacaccgaggaatcaagatctatatgatgcagcaaaggcatatgctgaacaactcaaagaaaatggtgtgattaactacagtgtactagacttgacagcagaagaactagaggctatcaaacatcagcttaatccaaaagataatgatgtagagctttgagttaataaaaaatggggcaaataaatcatcatggaaaagtttgctcctgaattccatggagaagatgcaaacaacagggctactaaattcctagaatcaataaagggcaaattcacatcacccaaagatcccaagaaaaaagatagtatcatatctgtcaactcaatagatatagaagtaaccaaagaaagccctataacatcaaattcaactattatcaacccaacaaatgagacagatgatactgcagggaacaagcccaattatcaaagaaaacctctagtaagtttcaaagaagaccctacaccaagtgataatcccttttctaaactatacaaagaaaccatagaaacatttgataacaatgaagaagaatccagctattcatacgaagaaataaatgatcagacaaacgataatataacagcaagattagataggattgatgaaaaattaagtgaaatactaggaatgcttcacacattagtagtggcaagtgcaggacctacatctgctcgggatggtataagagatgccatgattggtttaagagaagaaatgatagaaaaaatcagaactgaagcattaatgaccaatgacagattagaagctatggcaagactcaggaatgaggaaagtgaaaagatggcaaaagacacatcagatgaagtgtctctcaatccaacatcagagaaattgaacaacctattggaagggaatgatagtgacaatgatctatcacttgaagatttctgattagttaccactcttcacatcaacacacaataccaacagaagaccaacaaactaaccaacccaatcatccaaccaaacatccatccgccaatcagccaaacagccaacaaaacaaccagccaatccaaaactaaccacccggaaaaaatctataatatagttacaaaaaaaggaaagggtggggcaaatatggaaacatacgtgaacaagcttcacgaaggctccacatacacagctgctgttcaatacaatgtcttagaaaaagacgatgaccctgcatcacttacaatatgggtgcccatgttccaatcatctatgccagcagatttacttataaaagaactagctaatgtcaacatactagtgaaacaaatatccacacccaagggaccttcactaagagtcatgataaactcaagaagtgcagtgctagcacaaatgcccagcaaatttaccatatgcgctaatgtgtccttggatgaaagaagcaaactagcatatgatgtaaccacaccctgtgaaatcaaggcatgtagtctaacatgcctaaaatcaaaaaatatgttgactacagttaaagatctcactatgaagacactcaaccctacacatgatattattgctttatgtgaatttgaaaacatagtaacatcaaaaaaagtcataataccaacatacctaagatccatcagtgtcagaaataaagatctgaacacacttgaaaatataacaaccactgaattcaaaaatgctatcacaaatgcaaaaatcatcccttactcaggattactattagtcatcacagtgactgacaacaaaggagcattcaaatacataaagccacaaagtcaattcatagtagatcttggagcttacctagaaaaagaaagtatatattatgttaccacaaattggaagcacacagctacacgatttgcaatcaaacccatggaagattaacctttttcctctacatcagtgtgttaattcatacaaactttctacctacattcttcacttcaccatcacaatcacaaacactctgtggttcaaccaatcaaacaaaacttatctgaagtcccagatcatcccaagtcattgtttatcagatctagtactcaaataagttaataaaaaatatacacatggacgtccatggggcaaatgcaaacatgtttgtttttcttgttttattgccactagtctctagtcagtgtgttaatcttacaaccagaactcaattaccccctgcatacactaattctttcacacgtggtgtttattaccctgacaaagttttcagatcctcagttttacattcaactcaggacttgttcttacctttcttttccaatgttacttggttccatgctatacatgtctctgggaccaatggtactaagaggtttgctaaccctgtcctaccatttaatgatggtgtttattttgcttccactgagaagtctaacataataagaggctggatttttggtactactttagattcgaagacccagtccctacttattgttaataacgctactaatgttgttattaaagtctgtgaatttcaattttgtaatgatccatttttgggtgtttattaccacaaaaacaacaaaagttggatggaaagtgagttcagagtttattctagtgcgaataattgcacttttgaatatgtctctcagccttttcttatggaccttgaaggaaaacagggtaatttcaaaaatcttagggaatttgtgtttaagaatattgatggttattttaaaatatattctaagcacacgcctattaatttagtgcgtggtctccctcagggtttttcggctttagaaccattggtagatttgccaataggtattaacatcactaggtttcaaactttacatagaagttatttgactcctggtgattcttcttcaggttggacagctggtgctgcagcttattatgtgggttatcttcaacctaggacttttctattaaaatataatgaaaatggaaccattacagatgctgtagactgtgcacttgaccctctctcagaaacaaagtgtacgttgaaatccttcactgtagaaaaaggaatctatcaaacttctaactttagagtccaaccaacagaatctattgttagatttcctaatattacaaacttgtgcccttttggtgaagtttttaacgccaccagatttgcatctgtttatgcttggaacaggaagagaatcagcaactgtgttgctgattattctgtcctatataattccgcatcattttccacttttaagtgttatggagtgtctcctactaaattaaatgatctctgctttactaatgtctatgcagattcatttgtaattagaggtgatgaagtcagacaaatcgctccagggcaaactggaaatattgctgattataattataaattaccagatgattttacaggctgcgttatagcttggaattctaacaatcttgattctaaggttggtggtaattataattacctgtatagattgtttaggaagtctaatctcaaaccttttgagagagatatttcaactgaaatctatcaggccggtagcacaccttgtaatggtgttaaaggttttaattgttactttcctttacaatcatatggtttccaacccacttatggtgttggttaccaaccatacagagtagtagtactttcttttgaacttctacatgcaccagcaactgtttgtggacctaaaaagtctactaatttggttaaaaacaaatgtgtcaatttcaacttcaatggtttaacaggcacaggtgttcttactgagtctaacaaaaagtttctgcctttccaacaatttggcagagacattgctgacactactgatgctgtccgtgatccacagacacttgagattcttgacattacaccatgttcttttggtggtgtcagtgttataacaccaggaacaaatacttctaaccaggttgctgttctttatcagggtgttaactgcacagaagtccctgttgctattcatgcagatcaacttactcctacttggcgtgtttattctacaggttctaatgtttttcaaacacgtgcaggctgtttaataggggctgaacatgtcaacaactcatatgagtgtgacatacccattggtgcaggtatatgcgctagttatcagactcagactaattctcctcggcgggcacgtagtgtagctagtcaatccatcattgcctacactatgtcacttggtgtagaaaattcagttgcttactctaataactctattgccatacccacaaattttactattagtgttaccacagaaattctaccagtgtctatgaccaagacatcagtagattgtacaatgtacatttgtggtgattcaactgaatgcagcaatcttttgttgcaatatggcagtttttgtacacaattaaaccgtgctttaactggaatagctgttgaacaagacaaaaacacccaagaagtttttgcacaagtcaaacaaatttacaaaacaccaccaattaaagattttggtggttttaatttttcacaaatattaccagatccatcaaaaccaagcaagaggtcatttattgaagatctacttttcaacaaagtgacacttgcagatgctggcttcatcaaacaatatggtgattgccttggtgatattgctgctagagacctcatttgtgcacaaaagtttaacggccttactgttttgccacctttgctcacagatgaaatgattgctcaatacacttctgcactgttagcgggtacaatcacttctggttggacctttggtgcaggtgctgcattacaaataccatttgctatgcaaatggcttataggtttaatggtattggagttacacagaatgttctctatgagaaccaaaaattgattgccaaccaatttaatagtgctattggcaaaattcaagactcactttcttccacagcaagtgcacttggaaaacttcaagatgtggtcaaccaaaatgcacaagctttaaacacgcttgttaaacaacttagctccaattttggtgcaatttcaagtgttttaaatgatatcctttcacgtcttgacaaagttgaggctgaagtgcaaattgataggttgatcacaggcagacttcaaagtttgcagacatatgtgactcaacaattaattagagctgcagaaatcagagcttctgctaatcttgctgctactaaaatgtcagagtgtgtacttggacaatcaaaaagagttgatttttgtggaaagggctatcatcttatgtccttccctcagtcagcacctcatggtgtagtcttcttgcatgtgacttatgtccctgcacaagaaaagaacttcacaactgctcctgccatttgtcatgatggaaaagcacactttcctcgtgaaggtgtctttgtttcaaatggcacacactggtttgtaacacaaaggaatttttatgaaccacaaatcattactacagacaacacatttgtgtctggtaactgtgatgttgtaataggaattgtcaacaacacagtttatgatcctttgcaacctgaattagactcattcaaggaggagttagataaatattttaagaatcatacatcaccagatgttgatttaggtgacatctctggcattaatgcttcagttgtaaacattcaaaaagaaattgaccgcctcaatgaggttgccaagaatttaaatgaatctctcatcgatctccaagaacttggaaagtatgagcagtatataaaatggccatggtacatttggctaggttttatagctggcttgattgccatagtaatggtgacaattatgctttgctgtatgaccagttgctgtagttgtctcaagggctgttgttcttgtggatcctgctgcaaatttgatgaagacgacggactgctcctatactgtaaggccagaagcacaccaatcacactaagcaaggatcaactgagtggtataaataatattgcatttagtaactaaataaaaatagcacctaatcatgttcttacaatggtttactatctgctcatagacaacccatctatcattggattttcttaaaatctgaacttcatcgaaactcttatctataaaccatctcacttacactatttaagtagattcctagtttatagttatataaaacacaattgaatgccagtcgaccttaccatctgtaaaaatgaaaactggggcaaatatgtcacgaaggaatccttgcaaatttgaaattcgaggtcattgcttaaatggtaagaggtgtcattttagtcataattattttgaatggccaccccatgcactgcttgtaagacaaaactttatgttaaacagaatacttaagtctatggataaaagtatagataccttatcagaaataagtggagctgcagagttggacagaacagaagagtatgctcttggtgtagttggagtgctagagagttatataggatcaataaacaatataactaaacaatcagcatgtgttgccatgagcaaactcctcactgaactcaatagtgatgatatcaaaaagctgagggacaatgaagagctaaattcacccaagataagagtgtacaatactgtcatatcatatattgaaagcaacaggaaaaacaataaacaaactatccatctgttaaaaagattgccagcagacgtattgaagaaaaccatcaaaaacacattggatatccataagagcataaccatcaacaacccaaaagaatcaactgttagtgatacaaatgaccatgccaaaaataatgatactacctgacaaatatccttgtagtataacttccatactaataacaagtagatgtagagttactatgtataatcaaaagaacacactatatttcaatcaaaacaacccaaataaccatatgtactcaccgaatcaaacattcaatgaaatccattggacctctcaagaattgattgacacaattcaaaattttctacaacatctaggtattattgaggatatatatacaatatatatattagtgtcataacactcaattctaacactcaccacatcgttacattattaattcaaacaattcaagttgtgggacaaaatggatcccattattaatggaaattctgctaatgtttatctaaccgatagttatttaaaaggtgttatctctttctcagagtgtaatgctttaggaagttacatattcaatggtccttatctcaaaaatgattataccaacttaattagtagacaaaatccattaatagaacacatgaatctaaagaaactaaatataacacagtccttaatatctaagtatcataaaggtgaaataaaattagaagaacctacttattttcagtcattacttatgacatacaagagtatgacctcgtcagaacagattgctaccactaatttacttaaaaagataataagaagagctatagaaataagtgatgtcaaagtctatgctatattgaataaactagggcttaaagaaaaggacaagattaaatccaacaatggacaagatgaagacaactcagttattacgaccataatcaaagatgatatactttcagctgttaaagataatcaatctcatcttaaagcagacaaaaatcactctacaaaacaaaaagacacaatcaaaacaacactcttgaagaaattgatgtgttcaatgcaacatcctccatcatggttaatacattggtttaacttatacacaaaattaaacaacatattaacacagtatcgatcaaatgaggtaaaaaaccatgggtttacattgatagataatcaaactcttagtggatttcaatttattttgaaccaatatggttgtatagtttatcataaggaactcaaaagaattactgtgacaacctataatcaattcttgacatggaaagatattagccttagtagattaaatgtttgtttaattacatggattagtaactgcttgaacacattaaataaaagcttaggcttaagatgcggattcaataatgttatcttgacacaactattcctttatggagattgtatactaaagctatttcacaatgaggggttctacataataaaagaggtagagggatttattatgtctctaattttaaatataacagaagaagatcaattcagaaaacgattttataatagtatgctcaacaacatcacagatgctgctaataaagctcagaaaaatctgctatcaagagtatgtcatacattattagataagacagtgtccgataatataataaatggcagatggataattctattaagtaagttccttaaattaattaagcttgcaggtgacaataaccttaacaatctgagtgaactatattttttgttcagaatatttggacacccaatggtagatgaaagacaagccatggatgctgttaaaattaattgcaatgagaccaaattttacttgttaagcagtctgagtatgttaagaggtgcctttatatatagaattataaaagggtttgtaaataattacaacagatggcctactttaagaaatgctattgttttacccttaagatggttaacttactataaactaaacacttatccttctttgttggaacttacagaaagagatttgattgtgttatcaggactacgtttctatcgtgagtttcggttgcctaaaaaagtggatcttgaaatgattataaatgataaagctatatcacctcctaaaaatttgatatggactagtttccctagaaattacatgccatcacacatacaaaactatatagaacatgaaaaattaaaattttccgagagtgataaatcaagaagagtattagagtattatttaagagataacaaattcaatgaatgtgatttatacaactgtgtagttaatcaaagttatctcaacaaccctaatcatgtggtatcattgacaggcaaagaaagagaactcagtgtaggtagaatgtttgcaatgcaaccgggaatgttcagacaggttcaaatattggcagagaaaatgatagctgaaaacattttacaattctttcctgaaagtcttacaagatatggtgatctagaactacaaaaaatattagaattgaaagcaggaataagtaacaaatcaaatcgctacaatgataattacaacaattacattagtaagtgctctatcatcacagatctcagcaaattcaatcaagcatttcgatatgaaacgtcatgtatttgtagtgatgtgctggatgaactgcatggtgtacaatctctattttcctggttacatttaactattcctcatgtcacaataatatgcacatataggcatgcacccccctatataggagatcatattgtagatcttaacaatgtagatgaacaaagtggattatatagatatcacatgggtggcatcgaagggtggtgtcaaaaactgtggaccatagaagctatatcactattggatctaatatctctcaaagggaaattctcaattactgctttaattaatggtgacaatcaatcaatagatataagcaaaccaatcagactcatggaaggtcaaactcatgctcaagcagattatttgctagcattaaatagccttaaattactgtataaagagtatgcaggcataggccacaaattaaaaggaactgagacttatatatcacgagatatgcaatttatgagtaaaacaattcaacataacggtgtatattacccagctagtataaagaaagtcctaagagtgggaccgtggataaacactatacttgatgatttcaaagtgagtctagaatctataggtagtttgacacaagaattagaatatagaggtgaaagtctattatgcagtttaatatttagaaatgtatggttatataatcagattgctctacaattaaaaaatcatgcattatgtaacaataaactatatttggacatattaaaggttctgaaacacttaaaaaccttttttaatcttgataatattgatacagcattaacattgtatatgaatttacccatgttatttggtggtggtgatcccaacttgttatatcgaagtttctatagaagaactcctgacttcctcacagaggctatagttcactctgtgttcatacttagttattatacaaaccatgacttaaaagataaacttcaagatctgtcagatgatagattgaataagttcttaacatgcataatcacgtttgacaaaaaccctaatgctgaattcgtaacattgatgagagatcctcaagctttagggtctgagagacaagctaaaattactagcgaaatcaatagactggcagttacagaggttttgagtacagctccaaacaaaatattctccaaaagtgcacaacattatactactacagagatagatctaaatgatattatgcaaaatatagaacctacatatcctcatgggctaagagttgtttatgaaagtttacccttttataaagcagagaaaatagtaaatcttatatcaggtacaaaatctataactaacatactggaaaaaacttctgccatagacttaacagatattgatagagccactgagatgatgaggaaaaacataactttgcttataaggatacttccattggattgtaacagagataaaagagagatattgagtatggaaaacctaagtattactgaattaagcaaatatgttagggaaagatcttggtctttatccaatatagttggtgttacatcacccagtatcatgtatacaatggacatcaaatatactacaagcactatatctagtggcataattatagagaaatataatgttaacagtttaacacgtggtgagagaggacccactaaaccatgggttggttcatctacacaagagaaaaaaacaatgccagtttataatagacaagtcttaaccaaaaaacagagagatcaaatagatctattagcaaaattggattgggtgtatgcatctatagataacaaggatgaattcatggaagaactcagcataggaacccttgggttaacatatgaaaaggccaagaaattatttccacaatatttaagtgtcaattatttgcatcgccttacagtcagtagtagaccatgtgaattccctgcatcaataccagcttatagaacaacaaattatcactttgacactagccctattaatcgcatattaacagaaaagtatggtgatgaagatattgacatagtattccaaaactgtataagctttggccttagtttaatgtcagtagtagaacaatttactaatgtatgtcctaacagaattattctcatacctaagcttaatgagatacatttgatgaaacctcccatattcacaggtgatgttgatattcacaagttaaaacaagtgatacaaaaacagcatatgtttttaccagacaaaataagtttgactcaatatgtggaattattcttaagtaataaaacactcaaatctggatctcatgttaattctaatttaatattggcacataaaatatctgactattttcataatacttacattttaagtactaatttagctggacattggattctgattatacaacttatgaaagattctaaaggtatttttgaaaaagattggggagagggatatataactgatcatatgtttattaatttgaaagttttcttcaatgcttataagacctatctcttgtgttttcataaaggttatggcaaagcaaagctggagtgtgatatgaacacttcagatcttctatgtgtattggaattaatagacagtagttattggaagtctatgtctaaggtatttttagaacaaaaagttatcaaatacattcttagccaagatgcaagtttacatagagtaaaaggatgtcatagcttcaaattatggtttcttaaacgtcttaatgtagcagaattcacagtttgcccttgggttgttaacatagattatcatccaacacatatgaaagcaatattaacttatatagatcttgttagaatgggattgataaatatagatagaatacacattaaaaataaacacaaattcaatgatgaattttatacttctaatctcttctacattaattataacttctcagataatactcatctattaactaaacatataaggattgctaattctgaattagaaaataattacaacaaattatatcatcctacaccagaaaccctagagaatatactagccaatccgattaaaagtaatgacaaaaagacactgaatgactattgtataggtaaaaatgttgactcaataatgttaccattgttatctaataagaagcttattaaatcgtctgcaatgattagaaccaattacagcaaacaagatttgtataatttattccctatggttgtgattgatagaattatagatcattcaggcaatacagccaaatccaaccaactttacactactacttcccaccaaatatctttagtgcacaatagcacatcactttactgcatgcttccttggcatcatattaatagattcaattttgtatttagttctacaggttgtaaaattagtatagagtatattttaaaagatcttaaaattaaagatcccaattgtatagcattcataggtgaaggagcagggaatttattattgcgtacagtagtggaacttcatcctgacataagatatatttacagaagtctgaaagattgcaatgatcatagtttacctattgagtttttaaggctgtacaatggacatatcaacattgattatggtgaaaatttgaccattcctgctacagatgcaaccaacaacattcattggtcttatttacatataaagtttgctgaacctatcagtctttttgtctgtgatgccgaattgtctgtaacagtcaactggagtaaaattataatagaatggagcaagcatgtaagaaagtgcaagtactgttcctcagttaataaatgtatgttaatagtaaaatatcatgctcaagatgatattgatttcaaattagacaatataactatattaaaaacttatgtatgcttaggcagtaagttaaagggatcggaggtttacttagtccttacaataggtcctgcgaatatattcccagtatttaatgtagtacaaaatgctaaattgatactatcaagaaccaaaaatttcatcatgcctaagaaagctgataaagagtctattgatgcaaatattaaaagtttgataccctttctttgttaccctataacaaaaaaaggaattaatactgcattgtcaaaactaaagagtgttgttagtggagatatactatcatattctatagctggacgtaatgaagttttcagcaataaacttataaatcataagcatatgaacatcttaaaatggttcaatcatgttttaaatttcagatcaacagaactaaactataaccatttatatatggtagaatctacatatccttacctaagtgaattgttaaacagcttgacaaccaatgaacttaaaaaactgattaaaatcacaggtagtctgttatacaactttcataatgaataatgaataaagatcttataataaaaattcccatagctatacactaacactgtattcaattatagttattaaaaattaaaaatcgtacgattttttaaataacttttagtgaactaatcctaaagttatcattttaatcttggaggaataaatttaaaccctaatctaattggtttatatgtgtattaactaaattacgagatattagtttttgacactttttttctcgt

SEQ ID NO: 66 - DNA, 23443 bp, Artificial Sequence
  Description of Artificial Sequence: Synthetic polynucleotide
aaacggatccttcgaaacgaaattaatacgactcactatagggaagtttttcgcgtctgatgaggccgttaggccgaaactcctctccggagtcacgcgaaaaaatgcgtacaacaaacttgcataaaccaaaaaaatggggcaaataagaatttgataagtaccacttaaatttaactcccttgcttagcgatggtgagcgagctgattaaggagaacatgcacatgaagctgtacatggagggcaccgtgaacaaccaccacttcaagtgcacatccgagggcgaaggcaagccctacgagggcacccagaccatgagaatcaaggcggtcgagggcggccctctccccttcgccttcgacatcctggctaccagcttcatgtacggcagcaaaaccttcatcaaccacacccagggcatccccgacttctttaagcagtccttccccgagggcttcacatgggagagagtcaccacatacgaagacgggggcgtgctgaccgctacccaggacaccagcctccaggacggctgcctcatctacaacgtcaagatcagaggggtgaacttcccatccaacggccctgtgatgcagaagaaaacactcggctgggaggcctccaccgagaccctgtaccccgctgacggcggcctggaaggcagagccgacatggccctgaagctcgtgggcgggggccacctgatctgcaacttgaagaccacatacagatccaagaaacccgctaagaacctcaagatgcccggcgtctactatgtggacagaagactggaaagaatcaaggaggccgacaaagagacctacgtcgagcagcacgaggtggctgtggccagatactgcgacctccctagcaaactggggcacagatgagtattcaattatagttattaaaaacttaacagaagacaaaaatggggcaaataagaatttgataagtaccacttaaatttaactcccttgcttagcgatgggttcgaattcgctatcgatgataaaagtacgtctacaaaatctatttgataatgatgaagtagcgctactaaaaataacgtgttatacggataaactaatacatctaacgaatgcgctagcgaaagcggtaatacatacgataaaactaaatggtatagtatttgtacatgtaataacgtcgtcggatatatgtccgaataataatatagtagtaaaatcgaattttacgacgatgccggtactacaaaatggtggttatatatgggaaatgatggaactaacgcattgttcgcaaccgaatggtctactagatgataattgtgaaataaaattttcgaaaaaactatcggattcgacgatgacgaattatatgaatcaactatcggaactactaggttttgatctaaatccgtaaattataattaatatcaactagcaaatcaatgtcactaacaccattagttaatataaaacttaacagaagacaaaaatggggcaaataaatcaattcagccaacccaaccatggatacgacgcataatgataatacgccgcaacgtctaatgataacggatatgcgtccgctatcgctagaaacgataataacgtcgctaacgcgtgatataataacgcataaatttatatatctaataaatcatgaatgtatagtacgtaaactagatgaacgtcaagcgacgtttacgtttctagtaaattatgaaatgaaactactacataaagtaggttcgacgaaatataaaaaatatacggaatataatacgaaatatggtacgtttccgatgccgatatttataaatcatgatggttttctagaatgtataggtataaaaccgacgaaacatacgccgataatatataaatatgatctaaatccgtaaatttcaacacaatattcacacaatctaaaacaacaactctatgcataactatactccatagtccagatggagcctgaaaattatagtaatttaaaattaaggagagatataagatagaagatggggcaaatacaaagatggctcttagcaaagtcaagttgaatgatacactcaacaaagatcaacttctgtcatccagcaaatacaccatccaacggagcacaggagatagtattgatactcctaattatgatgtgcagaaacacatcaataagttatgtggcatgttattaatcacagaagatgctaatcataaattcactgggttaataggtatgttatatgcgatgtctaggttaggaagagaagacaccataaaaatactcagagatgcgggatatcatgtaaaagcaaatggagtagatgtaacaacacatcgtcaagacattaatggaaaagaaatgaaatttgaagtgttaacattggcaagcttaacaactgaaattcaaatcaacattgagatagaatctagaaaatcctacaaaaaaatgctaaaagaaatgggagaggtagctccagaatacaggcatgactctcctgattgtgggatgataatattatgtatagcagcattagtaataactaaattagcagcaggggacagatctggtcttacagccgtgattaggagagctaataatgtcctaaaaaatgaaatgaaacgttacaaaggcttactacccaaggacatagccaacagcttctatgaagtgtttgaaaaacatccccactttatagatgtttttgttcattttggtatagcacaatcttctaccagaggtggcagtagagttgaagggatttttgcaggattgtttatgaatgcctatggtgcagggcaagtgatgttacggtggggagtcttagcaaaatcagttaaaaatattatgttaggacatgctagtgtgcaagcagaaatggaacaagttgttgaggtttatgaatatgcccaaaaattgggtggtgaagcaggattctaccatatattgaacaacccaaaagcatcattattatctttgactcaatttcctcacttctccagtgtagtattaggcaatgctgctggcctaggcataatgggagagtacagaggtacaccgaggaatcaagatctatatgatgcagcaaaggcatatgctgaacaactcaaagaaaatggtgtgattaactacagtgtactagacttgacagcagaagaactagaggctatcaaacatcagcttaatccaaaagataatgatgtagagctttgagttaataaaaaatggggcaaataaatcatcatggaaaagtttgctcctgaattccatggagaagatgcaaacaacagggctactaaattcctagaatcaataaagggcaaattcacatcacccaaagatcccaagaaaaaagatagtatcatatctgtcaactcaatagatatagaagtaaccaaagaaagccctataacatcaaattcaactattatcaacccaacaaatgagacagatgatactgcagggaacaagcccaattatcaaagaaaacctctagtaagtttcaaagaagaccctacaccaagtgataatcccttttctaaactatacaaagaaaccatagaaacatttgataacaatgaagaagaatccagctattcatacgaagaaataaatgatcagacaaacgataatataacagcaagattagataggattgatgaaaaattaagtgaaatactaggaatgcttcacacattagtagtggcaagtgcaggacctacatctgctcgggatggtataagagatgccatgattggtttaagagaagaaatgatagaaaaaatcagaactgaagcattaatgaccaatgacagattagaagctatggcaagactcaggaatgaggaaagtgaaaagatggcaaaagacacatcagatgaagtgtctctcaatccaacatcagagaaattgaacaacctattggaagggaatgatagtgacaatgatctatcacttgaagatttctgattagttaccactcttcacatcaacacacaataccaacagaagaccaacaaactaaccaacccaatcatccaaccaaacatccatccgccaatcagccaaacagccaacaaaacaaccagccaatccaaaactaaccacccggaaaaaatctataatatagttacaaaaaaaggaaagggtggggcaaatatggaaacatacgtgaacaagcttcacgaaggctccacatacacagctgctgttcaatacaatgtcttagaaaaagacgatgaccctgcatcacttacaatatgggtgcccatgttccaatcatctatgccagcagatttacttataaaagaactagctaatgtcaacatactagtgaaacaaatatccacacccaagggaccttcactaagagtcatgataaactcaagaagtgcagtgctagcacaaatgcccagcaaatttaccatatgcgctaatgtgtccttggatgaaagaagcaaactagcatatgatgtaaccacaccctgtgaaatcaaggcatgtagtctaacatgcctaaaatcaaaaaatatgttgactacagttaaagatctcactatgaagacactcaaccctacacatgatattattgctttatgtgaatttgaaaacatagtaacatcaaaaaaagtcataataccaacatacctaagatccatcagtgtcagaaataaagatctgaacacacttgaaaatataacaaccactgaattcaaaaatgctatcacaaatgcaaaaatcatcccttactcaggattactattagtcatcacagtgactgacaacaaaggagcattcaaatacataaagccacaaagtcaattcatagtagatcttggagcttacctagaaaaagaaagtatatattatgttaccacaaattggaagcacacagctacacgatttgcaatcaaacccatggaagattaacctttttcctctacatcagtgtgttaattcatacaaactttctacctacattcttcacttcaccatcacaatcacaaacactctgtggttcaaccaatcaaacaaaacttatctgaagtcccagatcatcccaagtcattgtttatcagatctagtactcaaataagttaataaaaaatatacacatggacgtccatggggcaaatgcaaacatgtttgtttttcttgttttattgccactagtctctagtcagtgtgttaatcttacaaccagaactcaattaccccctgcatacactaattctttcacacgtggtgtttattaccctgacaaagttttcagatcctcagttttacattcaactcaggacttgttcttacctttcttttccaatgttacttggttccatgctatacatgtctctgggaccaatggtactaagaggtttgctaaccctgtcctaccatttaatgatggtgtttattttgcttccactgagaagtctaacataataagaggctggatttttggtactactttagattcgaagacccagtccctacttattgttaataacgctactaatgttgttattaaagtctgtgaatttcaattttgtaatgatccatttttgggtgtttattaccacaaaaacaacaaaagttggatggaaagtgagttcagagtttattctagtgcgaataattgcacttttgaatatgtctctcagccttttcttatggaccttgaaggaaaacagggtaatttcaaaaatcttagggaatttgtgtttaagaatattgatggttattttaaaatatattctaagcacacgcctattaatttagtgcgtggtctccctcagggtttttcggctttagaaccattggtagatttgccaataggtattaacatcactaggtttcaaactttacatagaagttatttgactcctggtgattcttcttcaggttggacagctggtgctgcagcttattatgtgggttatcttcaacctaggacttttctattaaaatataatgaaaatggaaccattacagatgctgtagactgtgcacttgaccctctctcagaaacaaagtgtacgttgaaatccttcactgtagaaaaaggaatctatcaaacttctaactttagagtccaaccaacagaatctattgttagatttcctaatattacaaacttgtgcccttttggtgaagtttttaacgccaccagatttgcatctgtttatgcttggaacaggaagagaatcagcaactgtgttgctgattattctgtcctatataattccgcatcattttccacttttaagtgttatggagtgtctcctactaaattaaatgatctctgctttactaatgtctatgcagattcatttgtaattagaggtgatgaagtcagacaaatcgctccagggcaaactggaaatattgctgattataattataaattaccagatgattttacaggctgcgttatagcttggaattctaacaatcttgattctaaggttggtggtaattataattacctgtatagattgtttaggaagtctaatctcaaaccttttgagagagatatttcaactgaaatctatcaggccggtagcacaccttgtaatggtgttaaaggttttaattgttactttcctttacaatcatatggtttccaacccacttatggtgttggttaccaaccatacagagtagtagtactttcttttgaacttctacatgcaccagcaactgtttgtggacctaaaaagtctactaatttggttaaaaacaaatgtgtcaatttcaacttcaatggtttaacaggcacaggtgttcttactgagtctaacaaaaagtttctgcctttccaacaatttggcagagacattgctgacactactgatgctgtccgtgatccacagacacttgagattcttgacattacaccatgttcttttggtggtgtcagtgttataacaccaggaacaaatacttctaaccaggttgctgttctttatcagggtgttaactgcacagaagtccctgttgctattcatgcagatcaacttactcctacttggcgtgtttattctacaggttctaatgtttttcaaacacgtgcaggctgtttaataggggctgaacatgtcaacaactcatatgagtgtgacatacccattggtgcaggtatatgcgctagttatcagactcagactaattctcctcggcgggcacgtagtgtagctagtcaatccatcattgcctacactatgtcacttggtgtagaaaattcagttgcttactctaataactctattgccatacccacaaattttactattagtgttaccacagaaattctaccagtgtctatgaccaagacatcagtagattgtacaatgtacatttgtggtgattcaactgaatgcagcaatcttttgttgcaatatggcagtttttgtacacaattaaaccgtgctttaactggaatagctgttgaacaagacaaaaacacccaagaagtttttgcacaagtcaaacaaatttacaaaacaccaccaattaaagattttggtggttttaatttttcacaaatattaccagatccatcaaaaccaagcaagaggtcatttattgaagatctacttttcaacaaagtgacacttgcagatgctggcttcatcaaacaatatggtgattgccttggtgatattgctgctagagacctcatttgtgcacaaaagtttaacggccttactgttttgccacctttgctcacagatgaaatgattgctcaatacacttctgcactgttagcgggtacaatcacttctggttggacctttggtgcaggtgctgcattacaaataccatttgctatgcaaatggcttataggtttaatggtattggagttacacagaatgttctctatgagaaccaaaaattgattgccaaccaatttaatagtgctattggcaaaattcaagactcactttcttccacagcaagtgcacttggaaaacttcaagatgtggtcaaccaaaatgcacaagctttaaacacgcttgttaaacaacttagctccaattttggtgcaatttcaagtgttttaaatgatatcctttcacgtcttgacaaagttgaggctgaagtgcaaattgataggttgatcacaggcagacttcaaagtttgcagacatatgtgactcaacaattaattagagctgcagaaatcagagcttctgctaatcttgctgctactaaaatgtcagagtgtgtacttggacaatcaaaaagagttgatttttgtggaaagggctatcatcttatgtccttccctcagtcagcacctcatggtgtagtcttcttgcatgtgacttatgtccctgcacaagaaaagaacttcacaactgctcctgccatttgtcatgatggaaaagcacactttcctcgtgaaggtgtctttgtttcaaatggcacacactggtttgtaacacaaaggaatttttatgaaccacaaatcattactacagacaacacatttgtgtctggtaactgtgatgttgtaataggaattgtcaacaacacagtttatgatcctttgcaacctgaattagactcattcaaggaggagttagataaatattttaagaatcatacatcaccagatgttgatttaggtgacatctctggcattaatgcttcagttgtaaacattcaaaaagaaattgaccgcctcaatgaggttgccaagaatttaaatgaatctctcatcgatctccaagaacttggaaagtatgagcagtatataaaatggccatggtacatttggctaggttttatagctggcttgattgccatagtaatggtgacaattatgctttgctgtatgaccagttgctgtagttgtctcaagggctgttgttcttgtggatcctgctgcaaatttgatgaagacgacggactgctcctatactgtaaggccagaagcacaccaatcacactaagcaaggatcaactgagtggtataaataatattgcatttagtaactaaataaaaatagcacctaatcatgttcttacaatggtttactatctgctcatagacaacccatctatcattggattttcttaaaatctgaacttcatcgaaactcttatctataaaccatctcacttacactatttaagtagattcctagtttatagttatataaaacacaattgaatgccagtcgaccttaccatctgtaaaaatgaaaactggggcaaatatgtcacgaaggaatccttgcaaatttgaaattcgaggtcattgcttaaatggtaagaggtgtcattttagtcataattattttgaatggccaccccatgcactgcttgtaagacaaaactttatgttaaacagaatacttaagtctatggataaaagtatagataccttatcagaaataagtggagctgcagagttggacagaacagaagagtatgctcttggtgtagttggagtgctagagagttatataggatcaataaacaatataactaaacaatcagcatgtgttgccatgagcaaactcctcactgaactcaatagtgatgatatcaaaaagctgagggacaatgaagagctaaattcacccaagataagagtgtacaatactgtcatatcatatattgaaagcaacaggaaaaacaataaacaaactatccatctgttaaaaagattgccagcagacgtattgaagaaaaccatcaaaaacacattggatatccataagagcataaccatcaacaacccaaaagaatcaactgttagtgatacaaatgaccatgccaaaaataatgatactacctgacaaatatccttgtagtataacttccatactaataacaagtagatgtagagttactatgtataatcaaaagaacacactatatttcaatcaaaacaacccaaataaccatatgtactcaccgaatcaaacattcaatgaaatccattggacctctcaagaattgattgacacaattcaaaattttctacaacatctaggtattattgaggatatatatacaatatatatattagtgtcataacactcaattctaacactcaccacatcgttacattattaattcaaacaattcaagttgtgggacaaaatggatcccattattaatggaaattctgctaatgtttatctaaccgatagttatttaaaaggtgttatctctttctcagagtgtaatgctttaggaagttacatattcaatggtccttatctcaaaaatgattataccaacttaattagtagacaaaatccattaatagaacacatgaatctaaagaaactaaatataacacagtccttaatatctaagtatcataaaggtgaaataaaattagaagaacctacttattttcagtcattacttatgacatacaagagtatgacctcgtcagaacagattgctaccactaatttacttaaaaagataataagaagagctatagaaataagtgatgtcaaagtctatgctatattgaataaactagggcttaaagaaaaggacaagattaaatccaacaatggacaagatgaagacaactcagttattacgaccataatcaaagatgatatactttcagctgttaaagataatcaatctcatcttaaagcagacaaaaatcactctacaaaacaaaaagacacaatcaaaacaacactcttgaagaaattgatgtgttcaatgcaacatcctccatcatggttaatacattggtttaacttatacacaaaattaaacaacatattaacacagtatcgatcaaatgaggtaaaaaaccatgggtttacattgatagataatcaaactcttagtggatttcaatttattttgaaccaatatggttgtatagtttatcataaggaactcaaaagaattactgtgacaacctataatcaattcttgacatggaaagatattagccttagtagattaaatgtttgtttaattacatggattagtaactgcttgaacacattaaataaaagcttaggcttaagatgcggattcaataatgttatcttgacacaactattcctttatggagattgtatactaaagctatttcacaatgaggggttctacataataaaagaggtagagggatttattatgtctctaattttaaatataacagaagaagatcaattcagaaaacgattttataatagtatgctcaacaacatcacagatgctgctaataaagctcagaaaaatctgctatcaagagtatgtcatacattattagataagacagtgtccgataatataataaatggcagatggataattctattaagtaagttccttaaattaattaagcttgcaggtgacaataaccttaacaatctgagtgaactatattttttgttcagaatatttggacacccaatggtagatgaaagacaagccatggatgctgttaaaattaattgcaatgagaccaaattttacttgttaagcagtctgagtatgttaagaggtgcctttatatatagaattataaaagggtttgtaaataattacaacagatggcctactttaagaaatgctattgttttacccttaagatggttaacttactataaactaaacacttatccttctttgttggaacttacagaaagagatttgattgtgttatcaggactacgtttctatcgtgagtttcggttgcctaaaaaagtggatcttgaaatgattataaatgataaagctatatcacctcctaaaaatttgatatggactagtttccctagaaattacatgccatcacacatacaaaactatatagaacatgaaaaattaaaattttccgagagtgataaatcaagaagagtattagagtattatttaagagataacaaattcaatgaatgtgatttatacaactgtgtagttaatcaaagttatctcaacaaccctaatcatgtggtatcattgacaggcaaagaaagagaactcagtgtaggtagaatgtttgcaatgcaaccgggaatgttcagacaggttcaaatattggcagagaaaatgatagctgaaaacattttacaattctttcctgaaagtcttacaagatatggtgatctagaactacaaaaaatattagaattgaaagcaggaataagtaacaaatcaaatcgctacaatgataattacaacaattacattagtaagtgctctatcatcacagatctcagcaaattcaatcaagcatttcgatatgaaacgtcatgtatttgtagtgatgtgctggatgaactgcatggtgtacaatctctattttcctggttacatttaactattcctcatgtcacaataatatgcacatataggcatgcacccccctatataggagatcatattgtagatcttaacaatgtagatgaacaaagtggattatatagatatcacatgggtggcatcgaagggtggtgtcaaaaactgtggaccatagaagctatatcactattggatctaatatctctcaaagggaaattctcaattactgctttaattaatggtgacaatcaatcaatagatataagcaaaccaatcagactcatggaaggtcaaactcatgctcaagcagattatttgctagcattaaatagccttaaattactgtataaagagtatgcaggcataggccacaaattaaaaggaactgagacttatatatcacgagatatgcaatttatgagtaaaacaattcaacataacggtgtatattacccagctagtataaagaaagtcctaagagtgggaccgtggataaacactatacttgatgatttcaaagtgagtctagaatctataggtagtttgacacaagaattagaatatagaggtgaaagtctattatgcagtttaatatttagaaatgtatggttatataatcagattgctctacaattaaaaaatcatgcattatgtaacaataaactatatttggacatattaaaggttctgaaacacttaaaaaccttttttaatcttgataatattgatacagcattaacattgtatatgaatttacccatgttatttggtggtggtgatcccaacttgttatatcgaagtttctatagaagaactcctgacttcctcacagaggctatagttcactctgtgttcatacttagttattatacaaaccatgacttaaaagataaacttcaagatctgtcagatgatagattgaataagttcttaacatgcataatcacgtttgacaaaaaccctaatgctgaattcgtaacattgatgagagatcctcaagctttagggtctgagagacaagctaaaattactagcgaaatcaatagactggcagttacagaggttttgagtacagctccaaacaaaatattctccaaaagtgcacaacattatactactacagagatagatctaaatgatattatgcaaaatatagaacctacatatcctcatgggctaagagttgtttatgaaagtttacccttttataaagcagagaaaatagtaaatcttatatcaggtacaaaatctataactaacatactggaaaaaacttctgccatagacttaacagatattgatagagccactgagatgatgaggaaaaacataactttgcttataaggatacttccattggattgtaacagagataaaagagagatattgagtatggaaaacctaagtattactgaattaagcaaatatgttagggaaagatcttggtctttatccaatatagttggtgttacatcacccagtatcatgtatacaatggacatcaaatatactacaagcactatatctagtggcataattatagagaaatataatgttaacagtttaacacgtggtgagagaggacccactaaaccatgggttggttcatctacacaagagaaaaaaacaatgccagtttataatagacaagtcttaaccaaaaaacagagagatcaaatagatctattagcaaaattggattgggtgtatgcatctatagataacaaggatgaattcatggaagaactcagcataggaacccttgggttaacatatgaaaaggccaagaaattatttccacaatatttaagtgtcaattatttgcatcgccttacagtcagtagtagaccatgtgaattccctgcatcaataccagcttatagaacaacaaattatcactttgacactagccctattaatcgcatattaacagaaaagtatggtgatgaagatattgacatagtattccaaaactgtataagctttggccttagtttaatgtcagtagtagaacaatttactaatgtatgtcctaacagaattattctcatacctaagcttaatgagatacatttgatgaaacctcccatattcacaggtgatgttgatattcacaagttaaaacaagtgatacaaaaacagcatatgtttttaccagacaaaataagtttgactcaatatgtggaattattcttaagtaataaaacactcaaatctggatctcatgttaattctaatttaatattggcacataaaatatctgactattttcataatacttacattttaagtactaatttagctggacattggattctgattatacaacttatgaaagattctaaaggtatttttgaaaaagattggggagagggatatataactgatcatatgtttattaatttgaaagttttcttcaatgcttataagacctatctcttgtgttttcataaaggttatggcaaagcaaagctggagtgtgatatgaacacttcagatcttctatgtgtattggaattaatagacagtagttattggaagtctatgtctaaggtatttttagaacaaaaagttatcaaatacattcttagccaagatgcaagtttacatagagtaaaaggatgtcatagcttcaaattatggtttcttaaacgtcttaatgtagcagaattcacagtttgcccttgggttgttaacatagattatcatccaacacatatgaaagcaatattaacttatatagatcttgttagaatgggattgataaatatagatagaatacacattaaaaataaacacaaattcaatgatgaattttatacttctaatctcttctacattaattataacttctcagataatactcatctattaactaaacatataaggattgctaattctgaattagaaaataattacaacaaattatatcatcctacaccagaaaccctagagaatatactagccaatccgattaaaagtaatgacaaaaagacactgaatgactattgtataggtaaaaatgttgactcaataatgttaccattgttatctaataagaagcttattaaatcgtctgcaatgattagaaccaattacagcaaacaagatttgtataatttattccctatggttgtgattgatagaattatagatcattcaggcaatacagccaaatccaaccaactttacactactacttcccaccaaatatctttagtgcacaatagcacatcactttactgcatgcttccttggcatcatattaatagattcaattttgtatttagttctacaggttgtaaaattagtatagagtatattttaaaagatcttaaaattaaagatcccaattgtatagcattcataggtgaaggagcagggaatttattattgcgtacagtagtggaacttcatcctgacataagatatatttacagaagtctgaaagattgcaatgatcatagtttacctattgagtttttaaggctgtacaatggacatatcaacattgattatggtgaaaatttgaccattcctgctacagatgcaaccaacaacattcattggtcttatttacatataaagtttgctgaacctatcagtctttttgtctgtgatgccgaattgtctgtaacagtcaactggagtaaaattataatagaatggagcaagcatgtaagaaagtgcaagtactgttcctcagttaataaatgtatgttaatagtaaaatatcatgctcaagatgatattgatttcaaattagacaatataactatattaaaaacttatgtatgcttaggcagtaagttaaagggatcggaggtttacttagtccttacaataggtcctgcgaatatattcccagtatttaatgtagtacaaaatgctaaattgatactatcaagaaccaaaaatttcatcatgcctaagaaagctgataaagagtctattgatgcaaatattaaaagtttgataccctttctttgttaccctataacaaaaaaaggaattaatactgcattgtcaaaactaaagagtgttgttagtggagatatactatcatattctatagctggacgtaatgaagttttcagcaataaacttataaatcataagcatatgaacatcttaaaatggttcaatcatgttttaaatttcagatcaacagaactaaactataaccatttatatatggtagaatctacatatccttacctaagtgaattgttaaacagcttgacaaccaatgaacttaaaaaactgattaaaatcacaggtagtctgttatacaactttcataatgaataatgaataaagatcttataataaaaattcccatagctatacactaacactgtattcaattatagttattaaaaattaaaaatcgtacgattttttaaataacttttagtgaactaatcctaaagttatcattttaatcttggaggaataaatttaaaccctaatctaattggtttatatgtgtattaactaaattacgagatattagtttttgacactttttttctcgtgggtcggcatggcatctccacctcctcgcggtccgacctgggcatccgaaggaggacgcacgtccactcggatggctaagggagctgctaacaaagcccgaaaggaagctgagttggctgctgccaccgctgagcaataactagcataaccccttggggcctctaaacgggtcttgaggggttttttgctgaaaggaggaactatatacgcgtaagcttctcgacccattctcatgtttgacagcttatcatcgaatttctgccattcatccgcttattatcacttattcaggcgtagcaaccaggcgtttaagggcaccaataactgccttaaaaaaattacgccccgccctgccactcatcgcagtactgttgtaattcattaagcattctgccgacatggaagccatcacagacggcatgatgaacctgaatcgccagcggcatcagcaccttgtcgccttgcgtataatatttgcccatggtgaaaacgggggcgaagaagttgtccatattggccacgtttaaatcaaaactggtgaaactcacccagggattggctgagacgaaaaacatattctcaataaaccctttagggaaataggccaggttttcaccgtaacacgccacatcttgcgaatatatgtgtagaaactgccggaaatcgtcgtggtattcactccagagcgatgaaaacgtttcagtttgctcatggaaaacggtgtaacaagggtgaacactatcccatatcaccagctcaccgtctttcattgccatacggaattccggatgagcattcatcaggcgggcaagaatgtgaataaaggccggataaaacttgtgcttatttttctttacggtctttaaaaaggccgtaatatccagctgaacggtctggttataggtacattgagcaactgactgaaatgcctcaaaatgttctttacgatgccattgggatatatcaacggtggtatatccagtgatttttttctccattttagcttccttagctcctgaaaatctcgataactcaaaaaatacgcccggtagtgatcttatttcattatggtgaaagttggaacctcttacgtgccgatcaacgtctcattttcgccaaaagttggcccagggcttcccggtatcaacagggacaccaggatttatttattctgcgaagtgatcttccgtcacaggtatttattcgcgataagctcatggagcggcgtaaccgtcgcacaggaaggacagagaaagcgcggatctgggaagtgacggacagaacggtcaggacctggattggggaggcggttgccgccgctgctgctgacggtgtgacgttctctgttccggtcacaccacatacgttccgccattcctatgcgatgcacatgctgtatgccggtataccgctgaaagttctgcaaagcctgatgggacataagtccatcagttcaacggaagtctacacgaaggtttttgcgctggatgtggctgcccggcaccgggtgcagtttgcgatgccggagtctgatgcggttgcgatgctgaaacaattatcctgagaataaatgccttggcctttatatggaaatgtggaactgagtggatatgctgtttttgtctgttaaacagagaagctggctgttatccactgagaagcgaacgaaacagtcgggaaaatctcccattatcgtagagatccgcattattaatctcaggagcctgtgtagcgtttataggaagtagtgttctgtcatgatgcctgcaagcggtaacgaaaacgatttgaatatgccttcaggaacaatagaaatcttcgtgcggtgttacgttgaagtggagcggattatgtcagcaatggacagaacaacctaatgaacacagaaccatgatgtggtctgtccttttacagccagtaggctcgccgcagtcgagcgacggcgaagccctcgagtgagcgaggaagcaccagggaacagcacttatatattctgcttacacacgatgcctgaaaaaacttcccttggggttatccacttatccacggggatatttttataattattttttttatagtttttagatcttcttttttagagcgccttgtaggcctttatccatgctggttctagagaaggtgttgtgacaaattgccctttcagtgtgacaaatcaccctcaaatgacagtcctgtctgtgacaaattgcccttaaccctgtgacaaattgccctcagaagaagctgttttttcacaaagttatccctgcttattgactcttttttatttagtgtgacaatctaaaaacttgtcacacttcacatggatctgtcatggcggaaacagcggttatcaatcacaagaaacgtaaaaatagcccgcgaatcgtccagtcaaacgacctcactgaggcggcatatagtctctcccgggatcaaaaacgtatgctgtatctgttcgttgaccagatcagaaaatctgatggcaccctacaggaacatgacggtatctgcgagatccatgttgctaaatatgctgaaatattcggattgacctctgcggaagccagtaaggatatacggcaggcattgaagagtttcgcggggaaggaagtggttttttatcgccctgaagaggatgccggcgatgaaaaaggctatgaatcttttccttggtttatcaaacgtgcgcacagtccatccagagggctttacagtgtacatatcaacccatatctcattcccttctttatcgggttacagaaccggtttacgcagtttcggcttagtgaaacaaaagaaatcaccaatccgtatgccatgcgtttatacgaatccctgtgtcagtatcgtaagccggatggctcaggcatcgtctctctgaaaatcgactggatcatagagcgttaccagctgcctcaaagttaccagcgtatgcctgacttccgccgccgcttcctgcaggtctgtgttaatgagatcaacagcagaactccaatgcgcctctcatacattgagaaaaagaaaggccgccagacgactcatatcgtattttccttccgcgatatcacttccatgacgacaggatagtctgagggttatctgtcacagatttgagggtggttcgtcacatttgttctgacctactgagggtaatttgtcacagttttgctgtttccttcagcctgcatggattttctcatactttttgaactgtaatttttaaggaagccaaatttgagggcagtttgtcacagttgatttccttctctttcccttcgtcatgtgacctgatatcgggggttagttcgtcatcattgatgagggttgattatcacagtttattactctgaattggctatccgcgtgtgtacctctacctggagtttttcccacggtggatatttcttcttgcgctgagcgtaagagctatctgacagaacagttcttctttgcttcctcgccagttcgctcgctatgctcggttacacggctgcggcgagcgctagtgataataagtgactgaggtatgtgctcttcttatctccttttgtagtgttgctcttattttaaacaactttgcggttttttgatgactttgcgattttgttgttgctttgcagtaaattgcaagatttaataaaaaaacgcaaagcaatgattaaaggatgttcagaatgaaactcatggaaacacttaaccagtgcataaacgctggtcatgaaatgacgaaggctatcgccattgcacagtttaatgatgacagcccggaagcgaggaaaataacccggcgctggagaataggtgaagcagcggatttagttggggtttcttctcaggctatcagagatgccgagaaagcagggcgactaccgcacccggatatggaaattcgaggacgggttgagcaacgtgttggttatacaattgaacaaattaatcatatgcgtgatgtgtttggtacgcgattgcgacgtgctgaagacgtatttccaccggtgatcggggttgctgcccataaaggtggcgtttacaaaacctcagtttctgttcatcttgctcaggatctggctctgaaggggctacgtgttttgctcgtggaaggtaacgacccccagggaacagcctcaatgtatcacggatgggtaccagatcttcatattcatgcagaagacactctcctgcctttctatcttggggaaaaggacgatgtcacttatgcaataaagcccacttgctggccggggcttgacattattccttcctgtctggctctgcaccgtattgaaactgagttaatgggcaaatttgatgaaggtaaactgcccaccgatccacacctgatgctccgactggccattgaaactgttgctcatgactatgatgtcatagttattgacagcgcgcctaacctgggtatcggcacgattaatgtcgtatgtgctgctgatgtgctgattgttcccacgcctgctgagttgtttgactacacctccgcactgcagtttttcgatatgcttcgtgatctgctcaagaacgttgatcttaaagggttcgagcctgatgtacgtattttgcttaccaaatacagcaatagtaatggctctcagtccccgtggatggaggagcaaattcgggatgcctggggaagcatggttctaaaaaatgttgtacgtgaaacggatgaagttggtaaaggtcagatccggatgagaactgtttttgaacaggccattgatcaacgctcttcaactggtgcctggagaaatgctctttctatttgggaacctgtctgcaatgaaattttcgatcgtctgattaaaccacgctgggagattagataatgaagcgtgcgcctgttattccaaaacatacgctcaatactcaaccggttgaagatacttcgttatcgacaccagctgccccgatggtggattcgttaattgcgcgcgtaggagtaatggctcgcggtaatgccattactttgcctgtatgtggtcgggatgtgaagtttactcttgaagtgctccggggtgatagtgttgagaagacctctcgggtatggtcaggtaatgaacgtgaccaggagctgcttactgaggacgcactggatgatctcatcccttcttttctactgactggtcaacagacaccggcgttcggtcgaagagtatctggtgtcatagaaattgccgatgggagtcgccgtcgtaaagctgctgcacttaccgaaagtgattatcgtgttctggttggcgagctggatgatgagcagatggctgcattatccagattgggtaacgattatcgcccaacaagtgcttatgaacgtggtcagcgttatgcaagccgattgcagaatgaatttgctggaaatatttctgcgctggctgatgcggaaaatatttcacgtaagattattacccgctgtatcaacaccgccaaattgcctaaatcagttgttgctcttttttctcaccccggtgaactatctgcccggtcaggtgatgcacttcaaaaagcctttacagataaagaggaattacttaagcagcaggcatctaaccttcatgagcagaaaaaagctggggtgatatttgaagctgaagaagttatcactcttttaacttctgtgcttaaaacgtcatctgcatcaagaactagtttaagctcacgacatcagtttgctcctggagcgacagtattgtataagggcgataaaatggtgcttaacctggacaggtctcgtgttccaactgagtgtatagagaaaattgaggccattcttaaggaacttgaaaagccagcaccctgatgcgaccacgttttagtctacgtttatctgtctttacttaatgtcctttgttacaggccagaaagcataactggcctgaatattctctctgggcccactgttccacttgtatcgtcggtctgataatcagactgggaccacggtcccactcgtatcgtcggtctgattattagtctgggaccacggtcccactcgtatcgtcggtctgattattagtctgggaccacggtcccactcgtatcgtcggtctgataatcagactgggaccacggtcccactcgtatcgtcggtctgattattagtctgggaccatggtcccactcgtatcgtcggtctgattattagtctgggaccacggtcccactcgtatcgtcggtctgattattagtctggaaccacggtcccactcgtatcgtcggtctgattattagtctgggaccacggtcccactcgtatcgtcggtctgattattagtctgggaccacgatcccactcgtgttgtcggtctgattatcggtctgggaccacggtcccacttgtattgtcgatcagactatcagcgtgagactacgattccatcaatgcctgtcaagggcaagtattgacatgtcgtcgtaacctgtagaacggagtaacctcggtgtgcggttgtatgcctgctgtggattgctgctgtgtcctgcttatccacaacattttgcgcacggttatgtggacaaaatacctggttacccaggccgtgccggcacgttaaccgggctgcatccgatgcaagtgtgtcgctgtcgagttt

SEQ ID NO: 67 - DNA, 22647 bp, Artificial Sequence
  Description of Artificial Sequence: Synthetic polynucleotide
aaacggatccttcgaaacgaaattaatacgactcactatagggaagtttttcgcgtctgatgaggccgttaggccgaaactcctctccggagtcacgcgaaaaaatgcgtacaacaaacttgcataaaccaaaaaaatggggcaaataagaatttgataagtaccacttaaatttaactcccttgcttagcgatgggttcgaattcgctatcgatgataaaagtacgtctacaaaatctatttgataatgatgaagtagcgctactaaaaataacgtgttatacggataaactaatacatctaacgaatgcgctagcgaaagcggtaatacatacgataaaactaaatggtatagtatttgtacatgtaataacgtcgtcggatatatgtccgaataataatatagtagtaaaatcgaattttacgacgatgccggtactacaaaatggtggttatatatgggaaatgatggaactaacgcattgttcgcaaccgaatggtctactagatgataattgtgaaataaaattttcgaaaaaactatcggattcgacgatgacgaattatatgaatcaactatcggaactactaggttttgatctaaatccgtaaattataattaatatcaactagcaaatcaatgtcactaacaccattagttaatataaaacttaacagaagacaaaaatggggcaaataaatcaattcagccaacccaaccatggatacgacgcataatgataatacgccgcaacgtctaatgataacggatatgcgtccgctatcgctagaaacgataataacgtcgctaacgcgtgatataataacgcataaatttatatatctaataaatcatgaatgtatagtacgtaaactagatgaacgtcaagcgacgtttacgtttctagtaaattatgaaatgaaactactacataaagtaggttcgacgaaatataaaaaatatacggaatataatacgaaatatggtacgtttccgatgccgatatttataaatcatgatggttttctagaatgtataggtataaaaccgacgaaacatacgccgataatatataaatatgatctaaatccgtaaatttcaacacaatattcacacaatctaaaacaacaactctatgcataactatactccatagtccagatggagcctgaaaattatagtaatttaaaattaaggagagatataagatagaagatggggcaaatacaaagatggctcttagcaaagtcaagttgaatgatacactcaacaaagatcaacttctgtcatccagcaaatacaccatccaacggagcacaggagatagtattgatactcctaattatgatgtgcagaaacacatcaataagttatgtggcatgttattaatcacagaagatgctaatcataaattcactgggttaataggtatgttatatgcgatgtctaggttaggaagagaagacaccataaaaatactcagagatgcgggatatcatgtaaaagcaaatggagtagatgtaacaacacatcgtcaagacattaatggaaaagaaatgaaatttgaagtgttaacattggcaagcttaacaactgaaattcaaatcaacattgagatagaatctagaaaatcctacaaaaaaatgctaaaagaaatgggagaggtagctccagaatacaggcatgactctcctgattgtgggatgataatattatgtatagcagcattagtaataactaaattagcagcaggggacagatctggtcttacagccgtgattaggagagctaataatgtcctaaaaaatgaaatgaaacgttacaaaggcttactacccaaggacatagccaacagcttctatgaagtgtttgaaaaacatccccactttatagatgtttttgttcattttggtatagcacaatcttctaccagaggtggcagtagagttgaagggatttttgcaggattgtttatgaatgcctatggtgcagggcaagtgatgttacggtggggagtcttagcaaaatcagttaaaaatattatgttaggacatgctagtgtgcaagcagaaatggaacaagttgttgaggtttatgaatatgcccaaaaattgggtggtgaagcaggattctaccatatattgaacaacccaaaagcatcattattatctttgactcaatttcctcacttctccagtgtagtattaggcaatgctgctggcctaggcataatgggagagtacagaggtacaccgaggaatcaagatctatatgatgcagcaaaggcatatgctgaacaactcaaagaaaatggtgtgattaactacagtgtactagacttgacagcagaagaactagaggctatcaaacatcagcttaatccaaaagataatgatgtagagctttgagttaataaaaaatggggcaaataaatcatcatggaaaagtttgctcctgaattccatggagaagatgcaaacaacagggctactaaattcctagaatcaataaagggcaaattcacatcacccaaagatcccaagaaaaaagatagtatcatatctgtcaactcaatagatatagaagtaaccaaagaaagccctataacatcaaattcaactattatcaacccaacaaatgagacagatgatactgcagggaacaagcccaattatcaaagaaaacctctagtaagtttcaaagaagaccctacaccaagtgataatcccttttctaaactatacaaagaaaccatagaaacatttgataacaatgaagaagaatccagctattcatacgaagaaataaatgatcagacaaacgataatataacagcaagattagataggattgatgaaaaattaagtgaaatactaggaatgcttcacacattagtagtggcaagtgcaggacctacatctgctcgggatggtataagagatgccatgattggtttaagagaagaaatgatagaaaaaatcagaactgaagcattaatgaccaatgacagattagaagctatggcaagactcaggaatgaggaaagtgaaaagatggcaaaagacacatcagatgaagtgtctctcaatccaacatcagagaaattgaacaacctattggaagggaatgatagtgacaatgatctatcacttgaagatttctgattagttaccactcttcacatcaacacacaataccaacagaagaccaacaaactaaccaacccaatcatccaaccaaacatccatccgccaatcagccaaacagccaacaaaacaaccagccaatccaaaactaaccacccggaaaaaatctataatatagttacaaaaaaaggaaagggtggggcaaatatggaaacatacgtgaacaagcttcacgaaggctccacatacacagctgctgttcaatacaatgtcttagaaaaagacgatgaccctgcatcacttacaatatgggtgcccatgttccaatcatctatgccagcagatttacttataaaagaactagctaatgtcaacatactagtgaaacaaatatccacacccaagggaccttcactaagagtcatgataaactcaagaagtgcagtgctagcacaaatgcccagcaaatttaccatatgcgctaatgtgtccttggatgaaagaagcaaactagcatatgatgtaaccacaccctgtgaaatcaaggcatgtagtctaacatgcctaaaatcaaaaaatatgttgactacagttaaagatctcactatgaagacactcaaccctacacatgatattattgctttatgtgaatttgaaaacatagtaacatcaaaaaaagtcataataccaacatacctaagatccatcagtgtcagaaataaagatctgaacacacttgaaaatataacaaccactgaattcaaaaatgctatcacaaatgcaaaaatcatcccttactcaggattactattagtcatcacagtgactgacaacaaaggagcattcaaatacataaagccacaaagtcaattcatagtagatcttggagcttacctagaaaaagaaagtatatattatgttaccacaaattggaagcacacagctacacgatttgcaatcaaacccatggaagattaacctttttcctctacatcagtgtgttaattcatacaaactttctacctacattcttcacttcaccatcacaatcacaaacactctgtggttcaaccaatcaaacaaaacttatctgaagtcccagatcatcccaagtcattgtttatcagatctagtactcaaataagttaataaaaaatatacacatggacgtccatggggcaaatgcaaacatgtttgtttttcttgttttattgccactagtctctagtcagtgtgttaatcttacaaccagaactcaattaccccctgcatacactaattctttcacacgtggtgtttattaccctgacaaagttttcagatcctcagttttacattcaactcaggacttgttcttacctttcttttccaatgttacttggttccatgctatacatgtctctgggaccaatggtactaagaggtttgctaaccctgtcctaccatttaatgatggtgtttattttgcttccactgagaagtctaacataataagaggctggatttttggtactactttagattcgaagacccagtccctacttattgttaataacgctactaatgttgttattaaagtctgtgaatttcaattttgtaatgatccatttttgggtgtttattaccacaaaaacaacaaaagttggatggaaagtgagttcagagtttattctagtgcgaataattgcacttttgaatatgtctctcagccttttcttatggaccttgaaggaaaacagggtaatttcaaaaatcttagggaatttgtgtttaagaatattgatggttattttaaaatatattctaagcacacgcctattaatttagtgcgtggtctccctcagggtttttcggctttagaaccattggtagatttgccaataggtattaacatcactaggtttcaaactttacatagaagttatttgactcctggtgattcttcttcaggttggacagctggtgctgcagcttattatgtgggttatcttcaacctaggacttttctattaaaatataatgaaaatggaaccattacagatgctgtagactgtgcacttgaccctctctcagaaacaaagtgtacgttgaaatccttcactgtagaaaaaggaatctatcaaacttctaactttagagtccaaccaacagaatctattgttagatttcctaatattacaaacttgtgcccttttggtgaagtttttaacgccaccagatttgcatctgtttatgcttggaacaggaagagaatcagcaactgtgttgctgattattctgtcctatataattccgcatcattttccacttttaagtgttatggagtgtctcctactaaattaaatgatctctgctttactaatgtctatgcagattcatttgtaattagaggtgatgaagtcagacaaatcgctccagggcaaactggaaatattgctgattataattataaattaccagatgattttacaggctgcgttatagcttggaattctaacaatcttgattctaaggttggtggtaattataattacctgtatagattgtttaggaagtctaatctcaaaccttttgagagagatatttcaactgaaatctatcaggccggtagcacaccttgtaatggtgttaaaggttttaattgttactttcctttacaatcatatggtttccaacccacttatggtgttggttaccaaccatacagagtagtagtactttcttttgaacttctacatgcaccagcaactgtttgtggacctaaaaagtctactaatttggttaaaaacaaatgtgtcaatttcaacttcaatggtttaacaggcacaggtgttcttactgagtctaacaaaaagtttctgcctttccaacaatttggcagagacattgctgacactactgatgctgtccgtgatccacagacacttgagattcttgacattacaccatgttcttttggtggtgtcagtgttataacaccaggaacaaatacttctaaccaggttgctgttctttatcagggtgttaactgcacagaagtccctgttgctattcatgcagatcaacttactcctacttggcgtgtttattctacaggttctaatgtttttcaaacacgtgcaggctgtttaataggggctgaacatgtcaacaactcatatgagtgtgacatacccattggtgcaggtatatgcgctagttatcagactcagactaattctcctcggcgggcacgtagtgtagctagtcaatccatcattgcctacactatgtcacttggtgtagaaaattcagttgcttactctaataactctattgccatacccacaaattttactattagtgttaccacagaaattctaccagtgtctatgaccaagacatcagtagattgtacaatgtacatttgtggtgattcaactgaatgcagcaatcttttgttgcaatatggcagtttttgtacacaattaaaccgtgctttaactggaatagctgttgaacaagacaaaaacacccaagaagtttttgcacaagtcaaacaaatttacaaaacaccaccaattaaagattttggtggttttaatttttcacaaatattaccagatccatcaaaaccaagcaagaggtcatttattgaagatctacttttcaacaaagtgacacttgcagatgctggcttcatcaaacaatatggtgattgccttggtgatattgctgctagagacctcatttgtgcacaaaagtttaacggccttactgttttgccacctttgctcacagatgaaatgattgctcaatacacttctgcactgttagcgggtacaatcacttctggttggacctttggtgcaggtgctgcattacaaataccatttgctatgcaaatggcttataggtttaatggtattggagttacacagaatgttctctatgagaaccaaaaattgattgccaaccaatttaatagtgctattggcaaaattcaagactcactttcttccacagcaagtgcacttggaaaacttcaagatgtggtcaaccaaaatgcacaagctttaaacacgcttgttaaacaacttagctccaattttggtgcaatttcaagtgttttaaatgatatcctttcacgtcttgacaaagttgaggctgaagtgcaaattgataggttgatcacaggcagacttcaaagtttgcagacatatgtgactcaacaattaattagagctgcagaaatcagagcttctgctaatcttgctgctactaaaatgtcagagtgtgtacttggacaatcaaaaagagttgatttttgtggaaagggctatcatcttatgtccttccctcagtcagcacctcatggtgtagtcttcttgcatgtgacttatgtccctgcacaagaaaagaacttcacaactgctcctgccatttgtcatgatggaaaagcacactttcctcgtgaaggtgtctttgtttcaaatggcacacactggtttgtaacacaaaggaatttttatgaaccacaaatcattactacagacaacacatttgtgtctggtaactgtgatgttgtaataggaattgtcaacaacacagtttatgatcctttgcaacctgaattagactcattcaaggaggagttagataaatattttaagaatcatacatcaccagatgttgatttaggtgacatctctggcattaatgcttcagttgtaaacattcaaaaagaaattgaccgcctcaatgaggttgccaagaatttaaatgaatctctcatcgatctccaagaacttggaaagtatgagcagtatataaaatggccatggtacatttggctaggttttatagctggcttgattgccatagtaatggtgacaattatgctttgctgtatgaccagttgctgtagttgtctcaagggctgttgttcttgtggatcctgctgcaaatttgatgaagacgacggactgctcctatactgtaaggccagaagcacaccaatcacactaagcaaggatcaactgagtggtataaataatattgcatttagtaactaaataaaaatagcacctaatcatgttcttacaatggtttactatctgctcatagacaacccatctatcattggattttcttaaaatctgaacttcatcgaaactcttatctataaaccatctcacttacactatttaagtagattcctagtttatagttatataaaacacaattgaatgccagtcgaccttaccatctgtaaaaatgaaaactggggcaaatatgtcacgaaggaatccttgcaaatttgaaattcgaggtcattgcttaaatggtaagaggtgtcattttagtcataattattttgaatggccaccccatgcactgcttgtaagacaaaactttatgttaaacagaatacttaagtctatggataaaagtatagataccttatcagaaataagtggagctgcagagttggacagaacagaagagtatgctcttggtgtagttggagtgctagagagttatataggatcaataaacaatataactaaacaatcagcatgtgttgccatgagcaaactcctcactgaactcaatagtgatgatatcaaaaagctgagggacaatgaagagctaaattcacccaagataagagtgtacaatactgtcatatcatatattgaaagcaacaggaaaaacaataaacaaactatccatctgttaaaaagattgccagcagacgtattgaagaaaaccatcaaaaacacattggatatccataagagcataaccatcaacaacccaaaagaatcaactgttagtgatacaaatgaccatgccaaaaataatgatactacctgacaaatatccttgtagtataacttccatactaataacaagtagatgtagagttactatgtataatcaaaagaacacactatatttcaatcaaaacaacccaaataaccatatgtactcaccgaatcaaacattcaatgaaatccattggacctctcaagaattgattgacacaattcaaaattttctacaacatctaggtattattgaggatatatatacaatatatatattagtgtcataacactcaattctaacactcaccacatcgttacattattaattcaaacaattcaagttgtgggacaaaatggatcccattattaatggaaattctgctaatgtttatctaaccgatagttatttaaaaggtgttatctctttctcagagtgtaatgctttaggaagttacatattcaatggtccttatctcaaaaatgattataccaacttaattagtagacaaaatccattaatagaacacatgaatctaaagaaactaaatataacacagtccttaatatctaagtatcataaaggtgaaataaaattagaagaacctacttattttcagtcattacttatgacatacaagagtatgacctcgtcagaacagattgctaccactaatttacttaaaaagataataagaagagctatagaaataagtgatgtcaaagtctatgctatattgaataaactagggcttaaagaaaaggacaagattaaatccaacaatggacaagatgaagacaactcagttattacgaccataatcaaagatgatatactttcagctgttaaagataatcaatctcatcttaaagcagacaaaaatcactctacaaaacaaaaagacacaatcaaaacaacactcttgaagaaattgatgtgttcaatgcaacatcctccatcatggttaatacattggtttaacttatacacaaaattaaacaacatattaacacagtatcgatcaaatgaggtaaaaaaccatgggtttacattgatagataatcaaactcttagtggatttcaatttattttgaaccaatatggttgtatagtttatcataaggaactcaaaagaattactgtgacaacctataatcaattcttgacatggaaagatattagccttagtagattaaatgtttgtttaattacatggattagtaactgcttgaacacattaaataaaagcttaggcttaagatgcggattcaataatgttatcttgacacaactattcctttatggagattgtatactaaagctatttcacaatgaggggttctacataataaaagaggtagagggatttattatgtctctaattttaaatataacagaagaagatcaattcagaaaacgattttataatagtatgctcaacaacatcacagatgctgctaataaagctcagaaaaatctgctatcaagagtatgtcatacattattagataagacagtgtccgataatataataaatggcagatggataattctattaagtaagttccttaaattaattaagcttgcaggtgacaataaccttaacaatctgagtgaactatattttttgttcagaatatttggacacccaatggtagatgaaagacaagccatggatgctgttaaaattaattgcaatgagaccaaattttacttgttaagcagtctgagtatgttaagaggtgcctttatatatagaattataaaagggtttgtaaataattacaacagatggcctactttaagaaatgctattgttttacccttaagatggttaacttactataaactaaacacttatccttctttgttggaacttacagaaagagatttgattgtgttatcaggactacgtttctatcgtgagtttcggttgcctaaaaaagtggatcttgaaatgattataaatgataaagctatatcacctcctaaaaatttgatatggactagtttccctagaaattacatgccatcacacatacaaaactatatagaacatgaaaaattaaaattttccgagagtgataaatcaagaagagtattagagtattatttaagagataacaaattcaatgaatgtgatttatacaactgtgtagttaatcaaagttatctcaacaaccctaatcatgtggtatcattgacaggcaaagaaagagaactcagtgtaggtagaatgtttgcaatgcaaccgggaatgttcagacaggttcaaatattggcagagaaaatgatagctgaaaacattttacaattctttcctgaaagtcttacaagatatggtgatctagaactacaaaaaatattagaattgaaagcaggaataagtaacaaatcaaatcgctacaatgataattacaacaattacattagtaagtgctctatcatcacagatctcagcaaattcaatcaagcatttcgatatgaaacgtcatgtatttgtagtgatgtgctggatgaactgcatggtgtacaatctctattttcctggttacatttaactattcctcatgtcacaataatatgcacatataggcatgcacccccctatataggagatcatattgtagatcttaacaatgtagatgaacaaagtggattatatagatatcacatgggtggcatcgaagggtggtgtcaaaaactgtggaccatagaagctatatcactattggatctaatatctctcaaagggaaattctcaattactgctttaattaatggtgacaatcaatcaatagatataagcaaaccaatcagactcatggaaggtcaaactcatgctcaagcagattatttgctagcattaaatagccttaaattactgtataaagagtatgcaggcataggccacaaattaaaaggaactgagacttatatatcacgagatatgcaatttatgagtaaaacaattcaacataacggtgtatattacccagctagtataaagaaagtcctaagagtgggaccgtggataaacactatacttgatgatttcaaagtgagtctagaatctataggtagtttgacacaagaattagaatatagaggtgaaagtctattatgcagtttaatatttagaaatgtatggttatataatcagattgctctacaattaaaaaatcatgcattatgtaacaataaactatatttggacatattaaaggttctgaaacacttaaaaaccttttttaatcttgataatattgatacagcattaacattgtatatgaatttacccatgttatttggtggtggtgatcccaacttgttatatcgaagtttctatagaagaactcctgacttcctcacagaggctatagttcactctgtgttcatacttagttattatacaaaccatgacttaaaagataaacttcaagatctgtcagatgatagattgaataagttcttaacatgcataatcacgtttgacaaaaaccctaatgctgaattcgtaacattgatgagagatcctcaagctttagggtctgagagacaagctaaaattactagcgaaatcaatagactggcagttacagaggttttgagtacagctccaaacaaaatattctccaaaagtgcacaacattatactactacagagatagatctaaatgatattatgcaaaatatagaacctacatatcctcatgggctaagagttgtttatgaaagtttacccttttataaagcagagaaaatagtaaatcttatatcaggtacaaaatctataactaacatactggaaaaaacttctgccatagacttaacagatattgatagagccactgagatgatgaggaaaaacataactttgcttataaggatacttccattggattgtaacagagataaaagagagatattgagtatggaaaacctaagtattactgaattaagcaaatatgttagggaaagatcttggtctttatccaatatagttggtgttacatcacccagtatcatgtatacaatggacatcaaatatactacaagcactatatctagtggcataattatagagaaatataatgttaacagtttaacacgtggtgagagaggacccactaaaccatgggttggttcatctacacaagagaaaaaaacaatgccagtttataatagacaagtcttaaccaaaaaacagagagatcaaatagatctattagcaaaattggattgggtgtatgcatctatagataacaaggatgaattcatggaagaactcagcataggaacccttgggttaacatatgaaaaggccaagaaattatttccacaatatttaagtgtcaattatttgcatcgccttacagtcagtagtagaccatgtgaattccctgcatcaataccagcttatagaacaacaaattatcactttgacactagccctattaatcgcatattaacagaaaagtatggtgatgaagatattgacatagtattccaaaactgtataagctttggccttagtttaatgtcagtagtagaacaatttactaatgtatgtcctaacagaattattctcatacctaagcttaatgagatacatttgatgaaacctcccatattcacaggtgatgttgatattcacaagttaaaacaagtgatacaaaaacagcatatgtttttaccagacaaaataagtttgactcaatatgtggaattattcttaagtaataaaacactcaaatctggatctcatgttaattctaatttaatattggcacataaaatatctgactattttcataatacttacattttaagtactaatttagctggacattggattctgattatacaacttatgaaagattctaaaggtatttttgaaaaagattggggagagggatatataactgatcatatgtttattaatttgaaagttttcttcaatgcttataagacctatctcttgtgttttcataaaggttatggcaaagcaaagctggagtgtgatatgaacacttcagatcttctatgtgtattggaattaatagacagtagttattggaagtctatgtctaaggtatttttagaacaaaaagttatcaaatacattcttagccaagatgcaagtttacatagagtaaaaggatgtcatagcttcaaattatggtttcttaaacgtcttaatgtagcagaattcacagtttgcccttgggttgttaacatagattatcatccaacacatatgaaagcaatattaacttatatagatcttgttagaatgggattgataaatatagatagaatacacattaaaaataaacacaaattcaatgatgaattttatacttctaatctcttctacattaattataacttctcagataatactcatctattaactaaacatataaggattgctaattctgaattagaaaataattacaacaaattatatcatcctacaccagaaaccctagagaatatactagccaatccgattaaaagtaatgacaaaaagacactgaatgactattgtataggtaaaaatgttgactcaataatgttaccattgttatctaataagaagcttattaaatcgtctgcaatgattagaaccaattacagcaaacaagatttgtataatttattccctatggttgtgattgatagaattatagatcattcaggcaatacagccaaatccaaccaactttacactactacttcccaccaaatatctttagtgcacaatagcacatcactttactgcatgcttccttggcatcatattaatagattcaattttgtatttagttctacaggttgtaaaattagtatagagtatattttaaaagatcttaaaattaaagatcccaattgtatagcattcataggtgaaggagcagggaatttattattgcgtacagtagtggaacttcatcctgacataagatatatttacagaagtctgaaagattgcaatgatcatagtttacctattgagtttttaaggctgtacaatggacatatcaacattgattatggtgaaaatttgaccattcctgctacagatgcaaccaacaacattcattggtcttatttacatataaagtttgctgaacctatcagtctttttgtctgtgatgccgaattgtctgtaacagtcaactggagtaaaattataatagaatggagcaagcatgtaagaaagtgcaagtactgttcctcagttaataaatgtatgttaatagtaaaatatcatgctcaagatgatattgatttcaaattagacaatataactatattaaaaacttatgtatgcttaggcagtaagttaaagggatcggaggtttacttagtccttacaataggtcctgcgaatatattcccagtatttaatgtagtacaaaatgctaaattgatactatcaagaaccaaaaatttcatcatgcctaagaaagctgataaagagtctattgatgcaaatattaaaagtttgataccctttctttgttaccctataacaaaaaaaggaattaatactgcattgtcaaaactaaagagtgttgttagtggagatatactatcatattctatagctggacgtaatgaagttttcagcaataaacttataaatcataagcatatgaacatcttaaaatggttcaatcatgttttaaatttcagatcaacagaactaaactataaccatttatatatggtagaatctacatatccttacctaagtgaattgttaaacagcttgacaaccaatgaacttaaaaaactgattaaaatcacaggtagtctgttatacaactttcataatgaataatgaataaagatcttataataaaaattcccatagctatacactaacactgtattcaattatagttattaaaaattaaaaatcgtacgattttttaaataacttttagtgaactaatcctaaagttatcattttaatcttggaggaataaatttaaaccctaatctaattggtttatatgtgtattaactaaattacgagatattagtttttgacactttttttctcgtgggtcggcatggcatctccacctcctcgcggtccgacctgggcatccgaaggaggacgcacgtccactcggatggctaagggagctgctaacaaagcccgaaaggaagctgagttggctgctgccaccgctgagcaataactagcataaccccttggggcctctaaacgggtcttgaggggttttttgctgaaaggaggaactatatacgcgtaagcttctcgacccattctcatgtttgacagcttatcatcgaatttctgccattcatccgcttattatcacttattcaggcgtagcaaccaggcgtttaagggcaccaataactgccttaaaaaaattacgccccgccctgccactcatcgcagtactgttgtaattcattaagcattctgccgacatggaagccatcacagacggcatgatgaacctgaatcgccagcggcatcagcaccttgtcgccttgcgtataatatttgcccatggtgaaaacgggggcgaagaagttgtccatattggccacgtttaaatcaaaactggtgaaactcacccagggattggctgagacgaaaaacatattctcaataaaccctttagggaaataggccaggttttcaccgtaacacgccacatcttgcgaatatatgtgtagaaactgccggaaatcgtcgtggtattcactccagagcgatgaaaacgtttcagtttgctcatggaaaacggtgtaacaagggtgaacactatcccatatcaccagctcaccgtctttcattgccatacggaattccggatgagcattcatcaggcgggcaagaatgtgaataaaggccggataaaacttgtgcttatttttctttacggtctttaaaaaggccgtaatatccagctgaacggtctggttataggtacattgagcaactgactgaaatgcctcaaaatgttctttacgatgccattgggatatatcaacggtggtatatccagtgatttttttctccattttagcttccttagctcctgaaaatctcgataactcaaaaaatacgcccggtagtgatcttatttcattatggtgaaagttggaacctcttacgtgccgatcaacgtctcattttcgccaaaagttggcccagggcttcccggtatcaacagggacaccaggatttatttattctgcgaagtgatcttccgtcacaggtatttattcgcgataagctcatggagcggcgtaaccgtcgcacaggaaggacagagaaagcgcggatctgggaagtgacggacagaacggtcaggacctggattggggaggcggttgccgccgctgctgctgacggtgtgacgttctctgttccggtcacaccacatacgttccgccattcctatgcgatgcacatgctgtatgccggtataccgctgaaagttctgcaaagcctgatgggacataagtccatcagttcaacggaagtctacacgaaggtttttgcgctggatgtggctgcccggcaccgggtgcagtttgcgatgccggagtctgatgcggttgcgatgctgaaacaattatcctgagaataaatgccttggcctttatatggaaatgtggaactgagtggatatgctgtttttgtctgttaaacagagaagctggctgttatccactgagaagcgaacgaaacagtcgggaaaatctcccattatcgtagagatccgcattattaatctcaggagcctgtgtagcgtttataggaagtagtgttctgtcatgatgcctgcaagcggtaacgaaaacgatttgaatatgccttcaggaacaatagaaatcttcgtgcggtgttacgttgaagtggagcggattatgtcagcaatggacagaacaacctaatgaacacagaaccatgatgtggtctgtccttttacagccagtaggctcgccgcagtcgagcgacggcgaagccctcgagtgagcgaggaagcaccagggaacagcacttatatattctgcttacacacgatgcctgaaaaaacttcccttggggttatccacttatccacggggatatttttataattattttttttatagtttttagatcttcttttttagagcgccttgtaggcctttatccatgctggttctagagaaggtgttgtgacaaattgccctttcagtgtgacaaatcaccctcaaatgacagtcctgtctgtgacaaattgcccttaaccctgtgacaaattgccctcagaagaagctgttttttcacaaagttatccctgcttattgactcttttttatttagtgtgacaatctaaaaacttgtcacacttcacatggatctgtcatggcggaaacagcggttatcaatcacaagaaacgtaaaaatagcccgcgaatcgtccagtcaaacgacctcactgaggcggcatatagtctctcccgggatcaaaaacgtatgctgtatctgttcgttgaccagatcagaaaatctgatggcaccctacaggaacatgacggtatctgcgagatccatgttgctaaatatgctgaaatattcggattgacctctgcggaagccagtaaggatatacggcaggcattgaagagtttcgcggggaaggaagtggttttttatcgccctgaagaggatgccggcgatgaaaaaggctatgaatcttttccttggtttatcaaacgtgcgcacagtccatccagagggctttacagtgtacatatcaacccatatctcattcccttctttatcgggttacagaaccggtttacgcagtttcggcttagtgaaacaaaagaaatcaccaatccgtatgccatgcgtttatacgaatccctgtgtcagtatcgtaagccggatggctcaggcatcgtctctctgaaaatcgactggatcatagagcgttaccagctgcctcaaagttaccagcgtatgcctgacttccgccgccgcttcctgcaggtctgtgttaatgagatcaacagcagaactccaatgcgcctctcatacattgagaaaaagaaaggccgccagacgactcatatcgtattttccttccgcgatatcacttccatgacgacaggatagtctgagggttatctgtcacagatttgagggtggttcgtcacatttgttctgacctactgagggtaatttgtcacagttttgctgtttccttcagcctgcatggattttctcatactttttgaactgtaatttttaaggaagccaaatttgagggcagtttgtcacagttgatttccttctctttcccttcgtcatgtgacctgatatcgggggttagttcgtcatcattgatgagggttgattatcacagtttattactctgaattggctatccgcgtgtgtacctctacctggagtttttcccacggtggatatttcttcttgcgctgagcgtaagagctatctgacagaacagttcttctttgcttcctcgccagttcgctcgctatgctcggttacacggctgcggcgagcgctagtgataataagtgactgaggtatgtgctcttcttatctccttttgtagtgttgctcttattttaaacaactttgcggttttttgatgactttgcgattttgttgttgctttgcagtaaattgcaagatttaataaaaaaacgcaaagcaatgattaaaggatgttcagaatgaaactcatggaaacacttaaccagtgcataaacgctggtcatgaaatgacgaaggctatcgccattgcacagtttaatgatgacagcccggaagcgaggaaaataacccggcgctggagaataggtgaagcagcggatttagttggggtttcttctcaggctatcagagatgccgagaaagcagggcgactaccgcacccggatatggaaattcgaggacgggttgagcaacgtgttggttatacaattgaacaaattaatcatatgcgtgatgtgtttggtacgcgattgcgacgtgctgaagacgtatttccaccggtgatcggggttgctgcccataaaggtggcgtttacaaaacctcagtttctgttcatcttgctcaggatctggctctgaaggggctacgtgttttgctcgtggaaggtaacgacccccagggaacagcctcaatgtatcacggatgggtaccagatcttcatattcatgcagaagacactctcctgcctttctatcttggggaaaaggacgatgtcacttatgcaataaagcccacttgctggccggggcttgacattattccttcctgtctggctctgcaccgtattgaaactgagttaatgggcaaatttgatgaaggtaaactgcccaccgatccacacctgatgctccgactggccattgaaactgttgctcatgactatgatgtcatagttattgacagcgcgcctaacctgggtatcggcacgattaatgtcgtatgtgctgctgatgtgctgattgttcccacgcctgctgagttgtttgactacacctccgcactgcagtttttcgatatgcttcgtgatctgctcaagaacgttgatcttaaagggttcgagcctgatgtacgtattttgcttaccaaatacagcaatagtaatggctctcagtccccgtggatggaggagcaaattcgggatgcctggggaagcatggttctaaaaaatgttgtacgtgaaacggatgaagttggtaaaggtcagatccggatgagaactgtttttgaacaggccattgatcaacgctcttcaactggtgcctggagaaatgctctttctatttgggaacctgtctgcaatgaaattttcgatcgtctgattaaaccacgctgggagattagataatgaagcgtgcgcctgttattccaaaacatacgctcaatactcaaccggttgaagatacttcgttatcgacaccagctgccccgatggtggattcgttaattgcgcgcgtaggagtaatggctcgcggtaatgccattactttgcctgtatgtggtcgggatgtgaagtttactcttgaagtgctccggggtgatagtgttgagaagacctctcgggtatggtcaggtaatgaacgtgaccaggagctgcttactgaggacgcactggatgatctcatcccttcttttctactgactggtcaacagacaccggcgttcggtcgaagagtatctggtgtcatagaaattgccgatgggagtcgccgtcgtaaagctgctgcacttaccgaaagtgattatcgtgttctggttggcgagctggatgatgagcagatggctgcattatccagattgggtaacgattatcgcccaacaagtgcttatgaacgtggtcagcgttatgcaagccgattgcagaatgaatttgctggaaatatttctgcgctggctgatgcggaaaatatttcacgtaagattattacccgctgtatcaacaccgccaaattgcctaaatcagttgttgctcttttttctcaccccggtgaactatctgcccggtcaggtgatgcacttcaaaaagcctttacagataaagaggaattacttaagcagcaggcatctaaccttcatgagcagaaaaaagctggggtgatatttgaagctgaagaagttatcactcttttaacttctgtgcttaaaacgtcatctgcatcaagaactagtttaagctcacgacatcagtttgctcctggagcgacagtattgtataagggcgataaaatggtgcttaacctggacaggtctcgtgttccaactgagtgtatagagaaaattgaggccattcttaaggaacttgaaaagccagcaccctgatgcgaccacgttttagtctacgtttatctgtctttacttaatgtcctttgttacaggccagaaagcataactggcctgaatattctctctgggcccactgttccacttgtatcgtcggtctgataatcagactgggaccacggtcccactcgtatcgtcggtctgattattagtctgggaccacggtcccactcgtatcgtcggtctgattattagtctgggaccacggtcccactcgtatcgtcggtctgataatcagactgggaccacggtcccactcgtatcgtcggtctgattattagtctgggaccatggtcccactcgtatcgtcggtctgattattagtctgggaccacggtcccactcgtatcgtcggtctgattattagtctggaaccacggtcccactcgtatcgtcggtctgattattagtctgggaccacggtcccactcgtatcgtcggtctgattattagtctgggaccacgatcccactcgtgttgtcggtctgattatcggtctgggaccacggtcccacttgtattgtcgatcagactatcagcgtgagactacgattccatcaatgcctgtcaagggcaagtattgacatgtcgtcgtaacctgtagaacggagtaacctcggtgtgcggttgtatgcctgctgtggattgctgctgtgtcctgcttatccacaacattttgcgcacggttatgtggacaaaatacctggttacccaggccgtgccggcacgttaaccgggctgcatccgatgcaagtgtgtcgctgtcgagttt

SEQ ID NO: 68 - protein, 1287 aa, Artificial Sequence
  Description of Artificial Sequence: Synthetic polypeptide
MFVFLVLLPLVSSQCVNLTTRTQLPPAYTNSFTRGVYYPDKVFRSSVLHSTQDLFLPFFSNVTWFHAISGTNGTKRFDNPVLPFNDGVYFASTEKSNIIRGWIFGTTLDSKTQSLLIVNNATNVVIKVCEFQFCNDPFLGVYHKNNKSWMESEFRVYSSANNCTFEYVSQPFLMDLEGKQGNFKNLREFVFKNIDGYFKIYSKHTPINLVRDLPQGFSALEPLVDLPIGINITRFQTLLALHRSYLTPGDSSSGWTAGAAAYYVGYLQPRTFLLKYNENGTITDAVDCALDPLSETKCTLKSFTVEKGIYQTSNFRVQPTESIVRFPNITNLCPFGEVFNATRFASVYAWNRKRISNCVADYSVLYNSASFSTFKCYGVSPTKLNDLCFTNVYADSFVIRGDEVRQIAPGQTGKIADYNYKLPDDFTGCVIAWNSNNLDSKVGGNYNYLYRLFRKSNLKPFERDISTEIYQAGSTPCNGVEGFNCYFPLQSYGFQPTYGVGYQPYRVVVLSFELLHAPATVCGPKKSTNLVKNKCVNFNFNGLTGTGVLTESNKKFLPFQQFGRDIDDTTDAVRDPQTLEILDITPCSFGGVSVITPGTNTSNQVAVLYQGVNCTEVPVAIHADQLTPTWRVYSTGSNVFQTRAGCLIGAEHVNNSYECDIPIGAGICASYQTQTNSHRRARSVASQSIIAYTMSLGAENSVAYSNNSIAIPINFTISVTTEILPVSMTKTSVDCTMYICGDSTECSNLLLQYGSFCTQLNRALTGIAVEQDKNTQEVFAQVKQIYKTPPIKDFGGFNFSQILPDPSKPSKRSFIEDLLFNKVTLADAGFIKQYGDCLGDIAARDLICAQKFNGLTVLPPLLTDEMIAQYTSALLAGTITSGWTFGAGAALQIPFAMQMAYRFNGIGVTQNVLYENQKLIANQFNSAIGKIQDSLSSTASALGKLQDVVNQNAQALNTLVKQLSSNFGAISSVLNDILARLDKVEAEVQIDRLITGRLQSLQTYVTQQLIRAAEIRASANLAATKMSECVLGQSKRVDFCGKGYHLMSFPQSAPHGVVFLHVTYVPAQEKNFTTAPAICHDGKAHFPREGVFVSNGTHWFVTQRNFYEPQIITTHNTFVSGNCDVVIGIVNNTVYDPLQPELDSFKEELDKYFKNHTSPDVDLGDISGINASVVNIQKEIDRLNEVAKNLNESLIDLQELGKYEQYIKWPWYIWLGFIAGLIAIVMVTIMLCCMTSCCSCLKGCCSCGSCCKFDEDDGLLLYCKARSTPITLSKDQLSGINNIAFSN

SEQ ID NO: 69 - DNA, 3864 bp, Artificial Sequence
  Description of Artificial Sequence: Synthetic polynucleotide
atgtttgtttttcttgttttattgccactagtctctagtcagtgtgttaatcttacaaccagaactcaattaccccctgcatacactaattctttcacacgtggtgtttattaccctgacaaagttttcagatcctcagttttacattcaactcaggacttgttcttacctttcttttccaatgttacttggttccatgctatctctgggaccaatggtactaagaggtttgataaccctgtcctaccatttaatgatggtgtttattttgcttccactgagaagtctaacataataagaggctggatttttggtactactttagattcgaagacccagtccctacttattgttaataacgctactaatgttgttattaaagtctgtgaatttcaattttgtaatgatccatttttgggtgtttaccacaaaaacaacaaaagttggatggaaagtgagttcagagtttattctagtgcgaataattgcacttttgaatatgtctctcagccttttcttatggaccttgaaggaaaacagggtaatttcaaaaatcttagggaatttgtgtttaagaatattgatggttattttaaaatatattctaagcacacgcctattaatttagtgcgtgatctccctcagggtttttcggctttagaaccattggtagatttgccaataggtattaacatcactaggtttcaaactttacttgctttacatagaagttatttgactcctggtgattcttcttcaggttggacagctggtgctgcagcttattatgtgggttatcttcaacctaggacttttctattaaaatataatgaaaatggaaccattacagatgctgtagactgtgcacttgaccctctctcagaaacaaagtgtacgttgaaatccttcactgtagaaaaaggaatctatcaaacttctaactttagagtccaaccaacagaatctattgttagatttcctaatattacaaacttgtgcccttttggtgaagtttttaacgccaccagatttgcatctgtttatgcttggaacaggaagagaatcagcaactgtgttgctgattattctgtcctatataattccgcatcattttccacttttaagtgttatggagtgtctcctactaaattaaatgatctctgctttactaatgtctatgcagattcatttgtaattagaggtgatgaagtcagacaaatcgctccagggcaaactggaaagattgctgattataattataaattaccagatgattttacaggctgcgttatagcttggaattctaacaatcttgattctaaggttggtggtaattataattacctgtatagattgtttaggaagtctaatctcaaaccttttgagagagatatttcaactgaaatctatcaggccggtagcacaccttgtaatggtgttgaaggttttaattgttactttcctttacaatcatatggtttccaacccacttatggtgttggttaccaaccatacagagtagtagtactttcttttgaacttctacatgcaccagcaactgtttgtggacctaaaaagtctactaatttggttaaaaacaaatgtgtcaatttcaacttcaatggtttaacaggcacaggtgttcttactgagtctaacaaaaagtttctgcctttccaacaatttggcagagacattgatgacactactgatgctgtccgtgatccacagacacttgagattcttgacattacaccatgttcttttggtggtgtcagtgttataacaccaggaacaaatacttctaaccaggttgctgttctttatcagggtgttaactgcacagaagtccctgttgctattcatgcagatcaacttactcctacttggcgtgtttattctacaggttctaatgtttttcaaacacgtgcaggctgtttaataggggctgaacatgtcaacaactcatatgagtgtgacatacccattggtgcaggtatatgcgctagttatcagactcagactaattctcatcggcgggcacgtagtgtagctagtcaatccatcattgcctacactatgtcacttggtgcagaaaattcagttgcttactctaataactctattgccatacccataaattttactattagtgttaccacagaaattctaccagtgtctatgaccaagacatcagtagattgtacaatgtacatttgtggtgattcaactgaatgcagcaatcttttgttgcaatatggcagtttttgtacacaattaaaccgtgctttaactggaatagctgttgaacaagacaaaaacacccaagaagtttttgcacaagtcaaacaaatttacaaaacaccaccaattaaagattttggtggttttaatttttcacaaatattaccagatccatcaaaaccaagcaagaggtcatttattgaagatctacttttcaacaaagtgacacttgcagatgctggcttcatcaaacaatatggtgattgccttggtgatattgctgctagagacctcatttgtgcacaaaagtttaacggccttactgttttgccacctttgctcacagatgaaatgattgctcaatacacttctgcactgttagcgggtacaatcacttctggttggacctttggtgcaggtgctgcattacaaataccatttgctatgcaaatggcttataggtttaatggtattggagttacacagaatgttctctatgagaaccaaaaattgattgccaaccaatttaatagtgctattggcaaaattcaagactcactttcttccacagcaagtgcacttggaaaacttcaagatgtggtcaaccaaaatgcacaagctttaaacacgcttgttaaacaacttagctccaattttggtgcaatttcaagtgttttaaatgatatccttgcacgtcttgacaaagttgaggctgaagtgcaaattgataggttgatcacaggcagacttcaaagtttgcagacatatgtgactcaacaattaattagagctgcagaaatcagagcttctgctaatcttgctgctactaaaatgtcagagtgtgtacttggacaatcaaaaagagttgatttttgtggaaagggctatcatcttatgtccttccctcagtcagcacctcatggtgtagtcttcttgcatgtgacttatgtccctgcacaagaaaagaacttcacaactgctcctgccatttgtcatgatggaaaagcacactttcctcgtgaaggtgtctttgtttcaaatggcacacactggtttgtaacacaaaggaatttttatgaaccacaaatcattactacacacaacacatttgtgtctggtaactgtgatgttgtaataggaattgtcaacaacacagtttatgatcctttgcaacctgaattagactcattcaaggaggagttagataaatattttaagaatcatacatcaccagatgttgatttaggtgacatctctggcattaatgcttcagttgtaaacattcaaaaagaaattgaccgcctcaatgaggttgccaagaatttaaatgaatctctcatcgatctccaagaacttggaaagtatgagcagtatataaaatggccatggtacatttggctaggttttatagctggcttgattgccatagtaatggtgacaattatgctttgctgtatgaccagttgctgtagttgtctcaagggctgttgttcttgtggatcctgctgcaaatttgatgaagacgacggactgctcctatactgtaaggccagaagcacaccaatcacactaagcaaggatcaactgagtggtataaataatattgcatttagtaactaa

SEQ ID NO: 70 - DNA, 16740 bp, Artificial Sequence
  Description of Artificial Sequence: Synthetic polynucleotide
acgcgaaaaaatgcgtacaacaaacttgcataaaccaaaaaaatggggcaaataagaatttgataagtaccacttaaatttaactcccttgcttagcgatggtgagcgagctgattaaggagaacatgcacatgaagctgtacatggagggcaccgtgaacaaccaccacttcaagtgcacatccgagggcgaaggcaagccctacgagggcacccagaccatgagaatcaaggcggtcgagggcggccctctccccttcgccttcgacatcctggctaccagcttcatgtacggcagcaaaaccttcatcaaccacacccagggcatccccgacttctttaagcagtccttccccgagggcttcacatgggagagagtcaccacatacgaagacgggggcgtgctgaccgctacccaggacaccagcctccaggacggctgcctcatctacaacgtcaagatcagaggggtgaacttcccatccaacggccctgtgatgcagaagaaaacactcggctgggaggcctccaccgagaccctgtaccccgctgacggcggcctggaaggcagagccgacatggccctgaagctcgtgggcgggggccacctgatctgcaacttgaagaccacatacagatccaagaaacccgctaagaacctcaagatgcccggcgtctactatgtggacagaagactggaaagaatcaaggaggccgacaaagagacctacgtcgagcagcacgaggtggctgtggccagatactgcgacctccctagcaaactggggcacagatgagtattcaattatagttattaaaaacttaacagaagacaaaaatggggcaaataagaatttgataagtaccacttaaatttaactcccttgcttagcgatgggttcgaattcgctatcgatgataaaagtacgtctacaaaatctatttgataatgatgaagtagcgctactaaaaataacgtgttatacggataaactaatacatctaacgaatgcgctagcgaaagcggtaatacatacgataaaactaaatggtatagtatttgtacatgtaataacgtcgtcggatatatgtccgaataataatatagtagtaaaatcgaattttacgacgatgccggtactacaaaatggtggttatatatgggaaatgatggaactaacgcattgttcgcaaccgaatggtctactagatgataattgtgaaataaaattttcgaaaaaactatcggattcgacgatgacgaattatatgaatcaactatcggaactactaggttttgatctaaatccgtaaattataattaatatcaactagcaaatcaatgtcactaacaccattagttaatataaaacttaacagaagacaaaaatggggcaaataaatcaattcagccaacccaaccatggatacgacgcataatgataatacgccgcaacgtctaatgataacggatatgcgtccgctatcgctagaaacgataataacgtcgctaacgcgtgatataataacgcataaatttatatatctaataaatcatgaatgtatagtacgtaaactagatgaacgtcaagcgacgtttacgtttctagtaaattatgaaatgaaactactacataaagtaggttcgacgaaatataaaaaatatacggaatataatacgaaatatggtacgtttccgatgccgatatttataaatcatgatggttttctagaatgtataggtataaaaccgacgaaacatacgccgataatatataaatatgatctaaatccgtaaatttcaacacaatattcacacaatctaaaacaacaactctatgcataactatactccatagtccagatggagcctgaaaattatagtaatttaaaattaaggagagatataagatagaagatggggcaaatacaaagatggctcttagcaaagtcaagttgaatgatacactcaacaaagatcaacttctgtcatccagcaaatacaccatccaacggagcacaggagatagtattgatactcctaattatgatgtgcagaaacacatcaataagttatgtggcatgttattaatcacagaagatgctaatcataaattcactgggttaataggtatgttatatgcgatgtctaggttaggaagagaagacaccataaaaatactcagagatgcgggatatcatgtaaaagcaaatggagtagatgtaacaacacatcgtcaagacattaatggaaaagaaatgaaatttgaagtgttaacattggcaagcttaacaactgaaattcaaatcaacattgagatagaatctagaaaatcctacaaaaaaatgctaaaagaaatgggagaggtagctccagaatacaggcatgactctcctgattgtgggatgataatattatgtatagcagcattagtaataactaaattagcagcaggggacagatctggtcttacagccgtgattaggagagctaataatgtcctaaaaaatgaaatgaaacgttacaaaggcttactacccaaggacatagccaacagcttctatgaagtgtttgaaaaacatccccactttatagatgtttttgttcattttggtatagcacaatcttctaccagaggtggcagtagagttgaagggatttttgcaggattgtttatgaatgcctatggtgcagggcaagtgatgttacggtggggagtcttagcaaaatcagttaaaaatattatgttaggacatgctagtgtgcaagcagaaatggaacaagttgttgaggtttatgaatatgcccaaaaattgggtggtgaagcaggattctaccatatattgaacaacccaaaagcatcattattatctttgactcaatttcctcacttctccagtgtagtattaggcaatgctgctggcctaggcataatgggagagtacagaggtacaccgaggaatcaagatctatatgatgcagcaaaggcatatgctgaacaactcaaagaaaatggtgtgattaactacagtgtactagacttgacagcagaagaactagaggctatcaaacatcagcttaatccaaaagataatgatgtagagctttgagttaataaaaaatggggcaaataaatcatcatggaaaagtttgctcctgaattccatggagaagatgcaaacaacagggctactaaattcctagaatcaataaagggcaaattcacatcacccaaagatcccaagaaaaaagatagtatcatatctgtcaactcaatagatatagaagtaaccaaagaaagccctataacatcaaattcaactattatcaacccaacaaatgagacagatgatactgcagggaacaagcccaattatcaaagaaaacctctagtaagtttcaaagaagaccctacaccaagtgataatcccttttctaaactatacaaagaaaccatagaaacatttgataacaatgaagaagaatccagctattcatacgaagaaataaatgatcagacaaacgataatataacagcaagattagataggattgatgaaaaattaagtgaaatactaggaatgcttcacacattagtagtggcaagtgcaggacctacatctgctcgggatggtataagagatgccatgattggtttaagagaagaaatgatagaaaaaatcagaactgaagcattaatgaccaatgacagattagaagctatggcaagactcaggaatgaggaaagtgaaaagatggcaaaagacacatcagatgaagtgtctctcaatccaacatcagagaaattgaacaacctattggaagggaatgatagtgacaatgatctatcacttgaagatttctgattagttaccactcttcacatcaacacacaataccaacagaagaccaacaaactaaccaacccaatcatccaaccaaacatccatccgccaatcagccaaacagccaacaaaacaaccagccaatccaaaactaaccacccggaaaaaatctataatatagttacaaaaaaaggaaagggtggggcaaatatggaaacatacgtgaacaagcttcacgaaggctccacatacacagctgctgttcaatacaatgtcttagaaaaagacgatgaccctgcatcacttacaatatgggtgcccatgttccaatcatctatgccagcagatttacttataaaagaactagctaatgtcaacatactagtgaaacaaatatccacacccaagggaccttcactaagagtcatgataaactcaagaagtgcagtgctagcacaaatgcccagcaaatttaccatatgcgctaatgtgtccttggatgaaagaagcaaactagcatatgatgtaaccacaccctgtgaaatcaaggcatgtagtctaacatgcctaaaatcaaaaaatatgttgactacagttaaagatctcactatgaagacactcaaccctacacatgatattattgctttatgtgaatttgaaaacatagtaacatcaaaaaaagtcataataccaacatacctaagatccatcagtgtcagaaataaagatctgaacacacttgaaaatataacaaccactgaattcaaaaatgctatcacaaatgcaaaaatcatcccttactcaggattactattagtcatcacagtgactgacaacaaaggagcattcaaatacataaagccacaaagtcaattcatagtagatcttggagcttacctagaaaaagaaagtatatattatgttaccacaaattggaagcacacagctacacgatttgcaatcaaacccatggaagattaacctttttcctctacatcagtgtgttaattcatacaaactttctacctacattcttcacttcaccatcacaatcacaaacactctgtggttcaaccaatcaaacaaaacttatctgaagtcccagatcatcccaagtcattgtttatcagatctagtactcaaataagttaataaaaaatatacacatggacgtccatggggcaaatgcaaacatgtttgtttttcttgttttattgccactagtctctagtcagtgtgttaatcttacaaccagaactcaattaccccctgcatacactaattctttcacacgtggtgtttattaccctgacaaagttttcagatcctcagttttacattcaactcaggacttgttcttacctttcttttccaatgttacttggttccatgctatctctgggaccaatggtactaagaggtttgataaccctgtcctaccatttaatgatggtgtttattttgcttccactgagaagtctaacataataagaggctggatttttggtactactttagattcgaagacccagtccctacttattgttaataacgctactaatgttgttattaaagtctgtgaatttcaattttgtaatgatccatttttgggtgtttaccacaaaaacaacaaaagttggatggaaagtgagttcagagtttattctagtgcgaataattgcacttttgaatatgtctctcagccttttcttatggaccttgaaggaaaacagggtaatttcaaaaatcttagggaatttgtgtttaagaatattgatggttattttaaaatatattctaagcacacgcctattaatttagtgcgtgatctccctcagggtttttcggctttagaaccattggtagatttgccaataggtattaacatcactaggtttcaaactttacttgctttacatagaagttatttgactcctggtgattcttcttcaggttggacagctggtgctgcagcttattatgtgggttatcttcaacctaggacttttctattaaaatataatgaaaatggaaccattacagatgctgtagactgtgcacttgaccctctctcagaaacaaagtgtacgttgaaatccttcactgtagaaaaaggaatctatcaaacttctaactttagagtccaaccaacagaatctattgttagatttcctaatattacaaacttgtgcccttttggtgaagtttttaacgccaccagatttgcatctgtttatgcttggaacaggaagagaatcagcaactgtgttgctgattattctgtcctatataattccgcatcattttccacttttaagtgttatggagtgtctcctactaaattaaatgatctctgctttactaatgtctatgcagattcatttgtaattagaggtgatgaagtcagacaaatcgctccagggcaaactggaaagattgctgattataattataaattaccagatgattttacaggctgcgttatagcttggaattctaacaatcttgattctaaggttggtggtaattataattacctgtatagattgtttaggaagtctaatctcaaaccttttgagagagatatttcaactgaaatctatcaggccggtagcacaccttgtaatggtgttgaaggttttaattgttactttcctttacaatcatatggtttccaacccacttatggtgttggttaccaaccatacagagtagtagtactttcttttgaacttctacatgcaccagcaactgtttgtggacctaaaaagtctactaatttggttaaaaacaaatgtgtcaatttcaacttcaatggtttaacaggcacaggtgttcttactgagtctaacaaaaagtttctgcctttccaacaatttggcagagacattgatgacactactgatgctgtccgtgatccacagacacttgagattcttgacattacaccatgttcttttggtggtgtcagtgttataacaccaggaacaaatacttctaaccaggttgctgttctttatcagggtgttaactgcacagaagtccctgttgctattcatgcagatcaacttactcctacttggcgtgtttattctacaggttctaatgtttttcaaacacgtgcaggctgtttaataggggctgaacatgtcaacaactcatatgagtgtgacatacccattggtgcaggtatatgcgctagttatcagactcagactaattctcatcggcgggcacgtagtgtagctagtcaatccatcattgcctacactatgtcacttggtgcagaaaattcagttgcttactctaataactctattgccatacccataaattttactattagtgttaccacagaaattctaccagtgtctatgaccaagacatcagtagattgtacaatgtacatttgtggtgattcaactgaatgcagcaatcttttgttgcaatatggcagtttttgtacacaattaaaccgtgctttaactggaatagctgttgaacaagacaaaaacacccaagaagtttttgcacaagtcaaacaaatttacaaaacaccaccaattaaagattttggtggttttaatttttcacaaatattaccagatccatcaaaaccaagcaagaggtcatttattgaagatctacttttcaacaaagtgacacttgcagatgctggcttcatcaaacaatatggtgattgccttggtgatattgctgctagagacctcatttgtgcacaaaagtttaacggccttactgttttgccacctttgctcacagatgaaatgattgctcaatacacttctgcactgttagcgggtacaatcacttctggttggacctttggtgcaggtgctgcattacaaataccatttgctatgcaaatggcttataggtttaatggtattggagttacacagaatgttctctatgagaaccaaaaattgattgccaaccaatttaatagtgctattggcaaaattcaagactcactttcttccacagcaagtgcacttggaaaacttcaagatgtggtcaaccaaaatgcacaagctttaaacacgcttgttaaacaacttagctccaattttggtgcaatttcaagtgttttaaatgatatccttgcacgtcttgacaaagttgaggctgaagtgcaaattgataggttgatcacaggcagacttcaaagtttgcagacatatgtgactcaacaattaattagagctgcagaaatcagagcttctgctaatcttgctgctactaaaatgtcagagtgtgtacttggacaatcaaaaagagttgatttttgtggaaagggctatcatcttatgtccttccctcagtcagcacctcatggtgtagtcttcttgcatgtgacttatgtccctgcacaagaaaagaacttcacaactgctcctgccatttgtcatgatggaaaagcacactttcctcgtgaaggtgtctttgtttcaaatggcacacactggtttgtaacacaaaggaatttttatgaaccacaaatcattactacacacaacacatttgtgtctggtaactgtgatgttgtaataggaattgtcaacaacacagtttatgatcctttgcaacctgaattagactcattcaaggaggagttagataaatattttaagaatcatacatcaccagatgttgatttaggtgacatctctggcattaatgcttcagttgtaaacattcaaaaagaaattgaccgcctcaatgaggttgccaagaatttaaatgaatctctcatcgatctccaagaacttggaaagtatgagcagtatataaaatggccatggtacatttggctaggttttatagctggcttgattgccatagtaatggtgacaattatgctttgctgtatgaccagttgctgtagttgtctcaagggctgttgttcttgtggatcctgctgcaaatttgatgaagacgacggactgctcctatactgtaaggccagaagcacaccaatcacactaagcaaggatcaactgagtggtataaataatattgcatttagtaactaaataaaaatagcacctaatcatgttcttacaatggtttactatctgctcatagacaacccatctatcattggattttcttaaaatctgaacttcatcgaaactcttatctataaaccatctcacttacactatttaagtagattcctagtttatagttatataaaacacaattgaatgccagtcgaccttaccatctgtaaaaatgaaaactggggcaaatatgtcacgaaggaatccttgcaaatttgaaattcgaggtcattgcttaaatggtaagaggtgtcattttagtcataattattttgaatggccaccccatgcactgcttgtaagacaaaactttatgttaaacagaatacttaagtctatggataaaagtatagataccttatcagaaataagtggagctgcagagttggacagaacagaagagtatgctcttggtgtagttggagtgctagagagttatataggatcaataaacaatataactaaacaatcagcatgtgttgccatgagcaaactcctcactgaactcaatagtgatgatatcaaaaagctgagggacaatgaagagctaaattcacccaagataagagtgtacaatactgtcatatcatatattgaaagcaacaggaaaaacaataaacaaactatccatctgttaaaaagattgccagcagacgtattgaagaaaaccatcaaaaacacattggatatccataagagcataaccatcaacaacccaaaagaatcaactgttagtgatacaaatgaccatgccaaaaataatgatactacctgacaaatatccttgtagtataacttccatactaataacaagtagatgtagagttactatgtataatcaaaagaacacactatatttcaatcaaaacaacccaaataaccatatgtactcaccgaatcaaacattcaatgaaatccattggacctctcaagaattgattgacacaattcaaaattttctacaacatctaggtattattgaggatatatatacaatatatatattagtgtcataacactcaattctaacactcaccacatcgttacattattaattcaaacaattcaagttgtgggacaaaatggatcccattattaatggaaattctgctaatgtttatctaaccgatagttatttaaaaggtgttatctctttctcagagtgtaatgctttaggaagttacatattcaatggtccttatctcaaaaatgattataccaacttaattagtagacaaaatccattaatagaacacatgaatctaaagaaactaaatataacacagtccttaatatctaagtatcataaaggtgaaataaaattagaagaacctacttattttcagtcattacttatgacatacaagagtatgacctcgtcagaacagattgctaccactaatttacttaaaaagataataagaagagctatagaaataagtgatgtcaaagtctatgctatattgaataaactagggcttaaagaaaaggacaagattaaatccaacaatggacaagatgaagacaactcagttattacgaccataatcaaagatgatatactttcagctgttaaagataatcaatctcatcttaaagcagacaaaaatcactctacaaaacaaaaagacacaatcaaaacaacactcttgaagaaattgatgtgttcaatgcaacatcctccatcatggttaatacattggtttaacttatacacaaaattaaacaacatattaacacagtatcgatcaaatgaggtaaaaaaccatgggtttacattgatagataatcaaactcttagtggatttcaatttattttgaaccaatatggttgtatagtttatcataaggaactcaaaagaattactgtgacaacctataatcaattcttgacatggaaagatattagccttagtagattaaatgtttgtttaattacatggattagtaactgcttgaacacattaaataaaagcttaggcttaagatgcggattcaataatgttatcttgacacaactattcctttatggagattgtatactaaagctatttcacaatgaggggttctacataataaaagaggtagagggatttattatgtctctaattttaaatataacagaagaagatcaattcagaaaacgattttataatagtatgctcaacaacatcacagatgctgctaataaagctcagaaaaatctgctatcaagagtatgtcatacattattagataagacagtgtccgataatataataaatggcagatggataattctattaagtaagttccttaaattaattaagcttgcaggtgacaataaccttaacaatctgagtgaactatattttttgttcagaatatttggacacccaatggtagatgaaagacaagccatggatgctgttaaaattaattgcaatgagaccaaattttacttgttaagcagtctgagtatgttaagaggtgcctttatatatagaattataaaagggtttgtaaataattacaacagatggcctactttaagaaatgctattgttttacccttaagatggttaacttactataaactaaacacttatccttctttgttggaacttacagaaagagatttgattgtgttatcaggactacgtttctatcgtgagtttcggttgcctaaaaaagtggatcttgaaatgattataaatgataaagctatatcacctcctaaaaatttgatatggactagtttccctagaaattacatgccatcacacatacaaaactatatagaacatgaaaaattaaaattttccgagagtgataaatcaagaagagtattagagtattatttaagagataacaaattcaatgaatgtgatttatacaactgtgtagttaatcaaagttatctcaacaaccctaatcatgtggtatcattgacaggcaaagaaagagaactcagtgtaggtagaatgtttgcaatgcaaccgggaatgttcagacaggttcaaatattggcagagaaaatgatagctgaaaacattttacaattctttcctgaaagtcttacaagatatggtgatctagaactacaaaaaatattagaattgaaagcaggaataagtaacaaatcaaatcgctacaatgataattacaacaattacattagtaagtgctctatcatcacagatctcagcaaattcaatcaagcatttcgatatgaaacgtcatgtatttgtagtgatgtgctggatgaactgcatggtgtacaatctctattttcctggttacatttaactattcctcatgtcacaataatatgcacatataggcatgcacccccctatataggagatcatattgtagatcttaacaatgtagatgaacaaagtggattatatagatatcacatgggtggcatcgaagggtggtgtcaaaaactgtggaccatagaagctatatcactattggatctaatatctctcaaagggaaattctcaattactgctttaattaatggtgacaatcaatcaatagatataagcaaaccaatcagactcatggaaggtcaaactcatgctcaagcagattatttgctagcattaaatagccttaaattactgtataaagagtatgcaggcataggccacaaattaaaaggaactgagacttatatatcacgagatatgcaatttatgagtaaaacaattcaacataacggtgtatattacccagctagtataaagaaagtcctaagagtgggaccgtggataaacactatacttgatgatttcaaagtgagtctagaatctataggtagtttgacacaagaattagaatatagaggtgaaagtctattatgcagtttaatatttagaaatgtatggttatataatcagattgctctacaattaaaaaatcatgcattatgtaacaataaactatatttggacatattaaaggttctgaaacacttaaaaaccttttttaatcttgataatattgatacagcattaacattgtatatgaatttacccatgttatttggtggtggtgatcccaacttgttatatcgaagtttctatagaagaactcctgacttcctcacagaggctatagttcactctgtgttcatacttagttattatacaaaccatgacttaaaagataaacttcaagatctgtcagatgatagattgaataagttcttaacatgcataatcacgtttgacaaaaaccctaatgctgaattcgtaacattgatgagagatcctcaagctttagggtctgagagacaagctaaaattactagcgaaatcaatagactggcagttacagaggttttgagtacagctccaaacaaaatattctccaaaagtgcacaacattatactactacagagatagatctaaatgatattatgcaaaatatagaacctacatatcctcatgggctaagagttgtttatgaaagtttacccttttataaagcagagaaaatagtaaatcttatatcaggtacaaaatctataactaacatactggaaaaaacttctgccatagacttaacagatattgatagagccactgagatgatgaggaaaaacataactttgcttataaggatacttccattggattgtaacagagataaaagagagatattgagtatggaaaacctaagtattactgaattaagcaaatatgttagggaaagatcttggtctttatccaatatagttggtgttacatcacccagtatcatgtatacaatggacatcaaatatactacaagcactatatctagtggcataattatagagaaatataatgttaacagtttaacacgtggtgagagaggacccactaaaccatgggttggttcatctacacaagagaaaaaaacaatgccagtttataatagacaagtcttaaccaaaaaacagagagatcaaatagatctattagcaaaattggattgggtgtatgcatctatagataacaaggatgaattcatggaagaactcagcataggaacccttgggttaacatatgaaaaggccaagaaattatttccacaatatttaagtgtcaattatttgcatcgccttacagtcagtagtagaccatgtgaattccctgcatcaataccagcttatagaacaacaaattatcactttgacactagccctattaatcgcatattaacagaaaagtatggtgatgaagatattgacatagtattccaaaactgtataagctttggccttagtttaatgtcagtagtagaacaatttactaatgtatgtcctaacagaattattctcatacctaagcttaatgagatacatttgatgaaacctcccatattcacaggtgatgttgatattcacaagttaaaacaagtgatacaaaaacagcatatgtttttaccagacaaaataagtttgactcaatatgtggaattattcttaagtaataaaacactcaaatctggatctcatgttaattctaatttaatattggcacataaaatatctgactattttcataatacttacattttaagtactaatttagctggacattggattctgattatacaacttatgaaagattctaaaggtatttttgaaaaagattggggagagggatatataactgatcatatgtttattaatttgaaagttttcttcaatgcttataagacctatctcttgtgttttcataaaggttatggcaaagcaaagctggagtgtgatatgaacacttcagatcttctatgtgtattggaattaatagacagtagttattggaagtctatgtctaaggtatttttagaacaaaaagttatcaaatacattcttagccaagatgcaagtttacatagagtaaaaggatgtcatagcttcaaattatggtttcttaaacgtcttaatgtagcagaattcacagtttgcccttgggttgttaacatagattatcatccaacacatatgaaagcaatattaacttatatagatcttgttagaatgggattgataaatatagatagaatacacattaaaaataaacacaaattcaatgatgaattttatacttctaatctcttctacattaattataacttctcagataatactcatctattaactaaacatataaggattgctaattctgaattagaaaataattacaacaaattatatcatcctacaccagaaaccctagagaatatactagccaatccgattaaaagtaatgacaaaaagacactgaatgactattgtataggtaaaaatgttgactcaataatgttaccattgttatctaataagaagcttattaaatcgtctgcaatgattagaaccaattacagcaaacaagatttgtataatttattccctatggttgtgattgatagaattatagatcattcaggcaatacagccaaatccaaccaactttacactactacttcccaccaaatatctttagtgcacaatagcacatcactttactgcatgcttccttggcatcatattaatagattcaattttgtatttagttctacaggttgtaaaattagtatagagtatattttaaaagatcttaaaattaaagatcccaattgtatagcattcataggtgaaggagcagggaatttattattgcgtacagtagtggaacttcatcctgacataagatatatttacagaagtctgaaagattgcaatgatcatagtttacctattgagtttttaaggctgtacaatggacatatcaacattgattatggtgaaaatttgaccattcctgctacagatgcaaccaacaacattcattggtcttatttacatataaagtttgctgaacctatcagtctttttgtctgtgatgccgaattgtctgtaacagtcaactggagtaaaattataatagaatggagcaagcatgtaagaaagtgcaagtactgttcctcagttaataaatgtatgttaatagtaaaatatcatgctcaagatgatattgatttcaaattagacaatataactatattaaaaacttatgtatgcttaggcagtaagttaaagggatcggaggtttacttagtccttacaataggtcctgcgaatatattcccagtatttaatgtagtacaaaatgctaaattgatactatcaagaaccaaaaatttcatcatgcctaagaaagctgataaagagtctattgatgcaaatattaaaagtttgataccctttctttgttaccctataacaaaaaaaggaattaatactgcattgtcaaaactaaagagtgttgttagtggagatatactatcatattctatagctggacgtaatgaagttttcagcaataaacttataaatcataagcatatgaacatcttaaaatggttcaatcatgttttaaatttcagatcaacagaactaaactataaccatttatatatggtagaatctacatatccttacctaagtgaattgttaaacagcttgacaaccaatgaacttaaaaaactgattaaaatcacaggtagtctgttatacaactttcataatgaataatgaataaagatcttataataaaaattcccatagctatacactaacactgtattcaattatagttattaaaaattaaaaatcgtacgattttttaaataacttttagtgaactaatcctaaagttatcattttaatcttggaggaataaatttaaaccctaatctaattggtttatatgtgtattaactaaattacgagatattagtttttgacactttttttctcgt

SEQ ID NO: 71 - DNA, 15944 bp, Artificial Sequence
  Description of Artificial Sequence: Synthetic polynucleotide
acgcgaaaaaatgcgtacaacaaacttgcataaaccaaaaaaatggggcaaataagaatttgataagtaccacttaaatttaactcccttgcttagcgatgggttcgaattcgctatcgatgataaaagtacgtctacaaaatctatttgataatgatgaagtagcgctactaaaaataacgtgttatacggataaactaatacatctaacgaatgcgctagcgaaagcggtaatacatacgataaaactaaatggtatagtatttgtacatgtaataacgtcgtcggatatatgtccgaataataatatagtagtaaaatcgaattttacgacgatgccggtactacaaaatggtggttatatatgggaaatgatggaactaacgcattgttcgcaaccgaatggtctactagatgataattgtgaaataaaattttcgaaaaaactatcggattcgacgatgacgaattatatgaatcaactatcggaactactaggttttgatctaaatccgtaaattataattaatatcaactagcaaatcaatgtcactaacaccattagttaatataaaacttaacagaagacaaaaatggggcaaataaatcaattcagccaacccaaccatggatacgacgcataatgataatacgccgcaacgtctaatgataacggatatgcgtccgctatcgctagaaacgataataacgtcgctaacgcgtgatataataacgcataaatttatatatctaataaatcatgaatgtatagtacgtaaactagatgaacgtcaagcgacgtttacgtttctagtaaattatgaaatgaaactactacataaagtaggttcgacgaaatataaaaaatatacggaatataatacgaaatatggtacgtttccgatgccgatatttataaatcatgatggttttctagaatgtataggtataaaaccgacgaaacatacgccgataatatataaatatgatctaaatccgtaaatttcaacacaatattcacacaatctaaaacaacaactctatgcataactatactccatagtccagatggagcctgaaaattatagtaatttaaaattaaggagagatataagatagaagatggggcaaatacaaagatggctcttagcaaagtcaagttgaatgatacactcaacaaagatcaacttctgtcatccagcaaatacaccatccaacggagcacaggagatagtattgatactcctaattatgatgtgcagaaacacatcaataagttatgtggcatgttattaatcacagaagatgctaatcataaattcactgggttaataggtatgttatatgcgatgtctaggttaggaagagaagacaccataaaaatactcagagatgcgggatatcatgtaaaagcaaatggagtagatgtaacaacacatcgtcaagacattaatggaaaagaaatgaaatttgaagtgttaacattggcaagcttaacaactgaaattcaaatcaacattgagatagaatctagaaaatcctacaaaaaaatgctaaaagaaatgggagaggtagctccagaatacaggcatgactctcctgattgtgggatgataatattatgtatagcagcattagtaataactaaattagcagcaggggacagatctggtcttacagccgtgattaggagagctaataatgtcctaaaaaatgaaatgaaacgttacaaaggcttactacccaaggacatagccaacagcttctatgaagtgtttgaaaaacatccccactttatagatgtttttgttcattttggtatagcacaatcttctaccagaggtggcagtagagttgaagggatttttgcaggattgtttatgaatgcctatggtgcagggcaagtgatgttacggtggggagtcttagcaaaatcagttaaaaatattatgttaggacatgctagtgtgcaagcagaaatggaacaagttgttgaggtttatgaatatgcccaaaaattgggtggtgaagcaggattctaccatatattgaacaacccaaaagcatcattattatctttgactcaatttcctcacttctccagtgtagtattaggcaatgctgctggcctaggcataatgggagagtacagaggtacaccgaggaatcaagatctatatgatgcagcaaaggcatatgctgaacaactcaaagaaaatggtgtgattaactacagtgtactagacttgacagcagaagaactagaggctatcaaacatcagcttaatccaaaagataatgatgtagagctttgagttaataaaaaatggggcaaataaatcatcatggaaaagtttgctcctgaattccatggagaagatgcaaacaacagggctactaaattcctagaatcaataaagggcaaattcacatcacccaaagatcccaagaaaaaagatagtatcatatctgtcaactcaatagatatagaagtaaccaaagaaagccctataacatcaaattcaactattatcaacccaacaaatgagacagatgatactgcagggaacaagcccaattatcaaagaaaacctctagtaagtttcaaagaagaccctacaccaagtgataatcccttttctaaactatacaaagaaaccatagaaacatttgataacaatgaagaagaatccagctattcatacgaagaaataaatgatcagacaaacgataatataacagcaagattagataggattgatgaaaaattaagtgaaatactaggaatgcttcacacattagtagtggcaagtgcaggacctacatctgctcgggatggtataagagatgccatgattggtttaagagaagaaatgatagaaaaaatcagaactgaagcattaatgaccaatgacagattagaagctatggcaagactcaggaatgaggaaagtgaaaagatggcaaaagacacatcagatgaagtgtctctcaatccaacatcagagaaattgaacaacctattggaagggaatgatagtgacaatgatctatcacttgaagatttctgattagttaccactcttcacatcaacacacaataccaacagaagaccaacaaactaaccaacccaatcatccaaccaaacatccatccgccaatcagccaaacagccaacaaaacaaccagccaatccaaaactaaccacccggaaaaaatctataatatagttacaaaaaaaggaaagggtggggcaaatatggaaacatacgtgaacaagcttcacgaaggctccacatacacagctgctgttcaatacaatgtcttagaaaaagacgatgaccctgcatcacttacaatatgggtgcccatgttccaatcatctatgccagcagatttacttataaaagaactagctaatgtcaacatactagtgaaacaaatatccacacccaagggaccttcactaagagtcatgataaactcaagaagtgcagtgctagcacaaatgcccagcaaatttaccatatgcgctaatgtgtccttggatgaaagaagcaaactagcatatgatgtaaccacaccctgtgaaatcaaggcatgtagtctaacatgcctaaaatcaaaaaatatgttgactacagttaaagatctcactatgaagacactcaaccctacacatgatattattgctttatgtgaatttgaaaacatagtaacatcaaaaaaagtcataataccaacatacctaagatccatcagtgtcagaaataaagatctgaacacacttgaaaatataacaaccactgaattcaaaaatgctatcacaaatgcaaaaatcatcccttactcaggattactattagtcatcacagtgactgacaacaaaggagcattcaaatacataaagccacaaagtcaattcatagtagatcttggagcttacctagaaaaagaaagtatatattatgttaccacaaattggaagcacacagctacacgatttgcaatcaaacccatggaagattaacctttttcctctacatcagtgtgttaattcatacaaactttctacctacattcttcacttcaccatcacaatcacaaacactctgtggttcaaccaatcaaacaaaacttatctgaagtcccagatcatcccaagtcattgtttatcagatctagtactcaaataagttaataaaaaatatacacatggacgtccatggggcaaatgcaaacatgtttgtttttcttgttttattgccactagtctctagtcagtgtgttaatcttacaaccagaactcaattaccccctgcatacactaattctttcacacgtggtgtttattaccctgacaaagttttcagatcctcagttttacattcaactcaggacttgttcttacctttcttttccaatgttacttggttccatgctatctctgggaccaatggtactaagaggtttgataaccctgtcctaccatttaatgatggtgtttattttgcttccactgagaagtctaacataataagaggctggatttttggtactactttagattcgaagacccagtccctacttattgttaataacgctactaatgttgttattaaagtctgtgaatttcaattttgtaatgatccatttttgggtgtttaccacaaaaacaacaaaagttggatggaaagtgagttcagagtttattctagtgcgaataattgcacttttgaatatgtctctcagccttttcttatggaccttgaaggaaaacagggtaatttcaaaaatcttagggaatttgtgtttaagaatattgatggttattttaaaatatattctaagcacacgcctattaatttagtgcgtgatctccctcagggtttttcggctttagaaccattggtagatttgccaataggtattaacatcactaggtttcaaactttacttgctttacatagaagttatttgactcctggtgattcttcttcaggttggacagctggtgctgcagcttattatgtgggttatcttcaacctaggacttttctattaaaatataatgaaaatggaaccattacagatgctgtagactgtgcacttgaccctctctcagaaacaaagtgtacgttgaaatccttcactgtagaaaaaggaatctatcaaacttctaactttagagtccaaccaacagaatctattgttagatttcctaatattacaaacttgtgcccttttggtgaagtttttaacgccaccagatttgcatctgtttatgcttggaacaggaagagaatcagcaactgtgttgctgattattctgtcctatataattccgcatcattttccacttttaagtgttatggagtgtctcctactaaattaaatgatctctgctttactaatgtctatgcagattcatttgtaattagaggtgatgaagtcagacaaatcgctccagggcaaactggaaagattgctgattataattataaattaccagatgattttacaggctgcgttatagcttggaattctaacaatcttgattctaaggttggtggtaattataattacctgtatagattgtttaggaagtctaatctcaaaccttttgagagagatatttcaactgaaatctatcaggccggtagcacaccttgtaatggtgttgaaggttttaattgttactttcctttacaatcatatggtttccaacccacttatggtgttggttaccaaccatacagagtagtagtactttcttttgaacttctacatgcaccagcaactgtttgtggacctaaaaagtctactaatttggttaaaaacaaatgtgtcaatttcaacttcaatggtttaacaggcacaggtgttcttactgagtctaacaaaaagtttctgcctttccaacaatttggcagagacattgatgacactactgatgctgtccgtgatccacagacacttgagattcttgacattacaccatgttcttttggtggtgtcagtgttataacaccaggaacaaatacttctaaccaggttgctgttctttatcagggtgttaactgcacagaagtccctgttgctattcatgcagatcaacttactcctacttggcgtgtttattctacaggttctaatgtttttcaaacacgtgcaggctgtttaataggggctgaacatgtcaacaactcatatgagtgtgacatacccattggtgcaggtatatgcgctagttatcagactcagactaattctcatcggcgggcacgtagtgtagctagtcaatccatcattgcctacactatgtcacttggtgcagaaaattcagttgcttactctaataactctattgccatacccataaattttactattagtgttaccacagaaattctaccagtgtctatgaccaagacatcagtagattgtacaatgtacatttgtggtgattcaactgaatgcagcaatcttttgttgcaatatggcagtttttgtacacaattaaaccgtgctttaactggaatagctgttgaacaagacaaaaacacccaagaagtttttgcacaagtcaaacaaatttacaaaacaccaccaattaaagattttggtggttttaatttttcacaaatattaccagatccatcaaaaccaagcaagaggtcatttattgaagatctacttttcaacaaagtgacacttgcagatgctggcttcatcaaacaatatggtgattgccttggtgatattgctgctagagacctcatttgtgcacaaaagtttaacggccttactgttttgccacctttgctcacagatgaaatgattgctcaatacacttctgcactgttagcgggtacaatcacttctggttggacctttggtgcaggtgctgcattacaaataccatttgctatgcaaatggcttataggtttaatggtattggagttacacagaatgttctctatgagaaccaaaaattgattgccaaccaatttaatagtgctattggcaaaattcaagactcactttcttccacagcaagtgcacttggaaaacttcaagatgtggtcaaccaaaatgcacaagctttaaacacgcttgttaaacaacttagctccaattttggtgcaatttcaagtgttttaaatgatatccttgcacgtcttgacaaagttgaggctgaagtgcaaattgataggttgatcacaggcagacttcaaagtttgcagacatatgtgactcaacaattaattagagctgcagaaatcagagcttctgctaatcttgctgctactaaaatgtcagagtgtgtacttggacaatcaaaaagagttgatttttgtggaaagggctatcatcttatgtccttccctcagtcagcacctcatggtgtagtcttcttgcatgtgacttatgtccctgcacaagaaaagaacttcacaactgctcctgccatttgtcatgatggaaaagcacactttcctcgtgaaggtgtctttgtttcaaatggcacacactggtttgtaacacaaaggaatttttatgaaccacaaatcattactacacacaacacatttgtgtctggtaactgtgatgttgtaataggaattgtcaacaacacagtttatgatcctttgcaacctgaattagactcattcaaggaggagttagataaatattttaagaatcatacatcaccagatgttgatttaggtgacatctctggcattaatgcttcagttgtaaacattcaaaaagaaattgaccgcctcaatgaggttgccaagaatttaaatgaatctctcatcgatctccaagaacttggaaagtatgagcagtatataaaatggccatggtacatttggctaggttttatagctggcttgattgccatagtaatggtgacaattatgctttgctgtatgaccagttgctgtagttgtctcaagggctgttgttcttgtggatcctgctgcaaatttgatgaagacgacggactgctcctatactgtaaggccagaagcacaccaatcacactaagcaaggatcaactgagtggtataaataatattgcatttagtaactaaataaaaatagcacctaatcatgttcttacaatggtttactatctgctcatagacaacccatctatcattggattttcttaaaatctgaacttcatcgaaactcttatctataaaccatctcacttacactatttaagtagattcctagtttatagttatataaaacacaattgaatgccagtcgaccttaccatctgtaaaaatgaaaactggggcaaatatgtcacgaaggaatccttgcaaatttgaaattcgaggtcattgcttaaatggtaagaggtgtcattttagtcataattattttgaatggccaccccatgcactgcttgtaagacaaaactttatgttaaacagaatacttaagtctatggataaaagtatagataccttatcagaaataagtggagctgcagagttggacagaacagaagagtatgctcttggtgtagttggagtgctagagagttatataggatcaataaacaatataactaaacaatcagcatgtgttgccatgagcaaactcctcactgaactcaatagtgatgatatcaaaaagctgagggacaatgaagagctaaattcacccaagataagagtgtacaatactgtcatatcatatattgaaagcaacaggaaaaacaataaacaaactatccatctgttaaaaagattgccagcagacgtattgaagaaaaccatcaaaaacacattggatatccataagagcataaccatcaacaacccaaaagaatcaactgttagtgatacaaatgaccatgccaaaaataatgatactacctgacaaatatccttgtagtataacttccatactaataacaagtagatgtagagttactatgtataatcaaaagaacacactatatttcaatcaaaacaacccaaataaccatatgtactcaccgaatcaaacattcaatgaaatccattggacctctcaagaattgattgacacaattcaaaattttctacaacatctaggtattattgaggatatatatacaatatatatattagtgtcataacactcaattctaacactcaccacatcgttacattattaattcaaacaattcaagttgtgggacaaaatggatcccattattaatggaaattctgctaatgtttatctaaccgatagttatttaaaaggtgttatctctttctcagagtgtaatgctttaggaagttacatattcaatggtccttatctcaaaaatgattataccaacttaattagtagacaaaatccattaatagaacacatgaatctaaagaaactaaatataacacagtccttaatatctaagtatcataaaggtgaaataaaattagaagaacctacttattttcagtcattacttatgacatacaagagtatgacctcgtcagaacagattgctaccactaatttacttaaaaagataataagaagagctatagaaataagtgatgtcaaagtctatgctatattgaataaactagggcttaaagaaaaggacaagattaaatccaacaatggacaagatgaagacaactcagttattacgaccataatcaaagatgatatactttcagctgttaaagataatcaatctcatcttaaagcagacaaaaatcactctacaaaacaaaaagacacaatcaaaacaacactcttgaagaaattgatgtgttcaatgcaacatcctccatcatggttaatacattggtttaacttatacacaaaattaaacaacatattaacacagtatcgatcaaatgaggtaaaaaaccatgggtttacattgatagataatcaaactcttagtggatttcaatttattttgaaccaatatggttgtatagtttatcataaggaactcaaaagaattactgtgacaacctataatcaattcttgacatggaaagatattagccttagtagattaaatgtttgtttaattacatggattagtaactgcttgaacacattaaataaaagcttaggcttaagatgcggattcaataatgttatcttgacacaactattcctttatggagattgtatactaaagctatttcacaatgaggggttctacataataaaagaggtagagggatttattatgtctctaattttaaatataacagaagaagatcaattcagaaaacgattttataatagtatgctcaacaacatcacagatgctgctaataaagctcagaaaaatctgctatcaagagtatgtcatacattattagataagacagtgtccgataatataataaatggcagatggataattctattaagtaagttccttaaattaattaagcttgcaggtgacaataaccttaacaatctgagtgaactatattttttgttcagaatatttggacacccaatggtagatgaaagacaagccatggatgctgttaaaattaattgcaatgagaccaaattttacttgttaagcagtctgagtatgttaagaggtgcctttatatatagaattataaaagggtttgtaaataattacaacagatggcctactttaagaaatgctattgttttacccttaagatggttaacttactataaactaaacacttatccttctttgttggaacttacagaaagagatttgattgtgttatcaggactacgtttctatcgtgagtttcggttgcctaaaaaagtggatcttgaaatgattataaatgataaagctatatcacctcctaaaaatttgatatggactagtttccctagaaattacatgccatcacacatacaaaactatatagaacatgaaaaattaaaattttccgagagtgataaatcaagaagagtattagagtattatttaagagataacaaattcaatgaatgtgatttatacaactgtgtagttaatcaaagttatctcaacaaccctaatcatgtggtatcattgacaggcaaagaaagagaactcagtgtaggtagaatgtttgcaatgcaaccgggaatgttcagacaggttcaaatattggcagagaaaatgatagctgaaaacattttacaattctttcctgaaagtcttacaagatatggtgatctagaactacaaaaaatattagaattgaaagcaggaataagtaacaaatcaaatcgctacaatgataattacaacaattacattagtaagtgctctatcatcacagatctcagcaaattcaatcaagcatttcgatatgaaacgtcatgtatttgtagtgatgtgctggatgaactgcatggtgtacaatctctattttcctggttacatttaactattcctcatgtcacaataatatgcacatataggcatgcacccccctatataggagatcatattgtagatcttaacaatgtagatgaacaaagtggattatatagatatcacatgggtggcatcgaagggtggtgtcaaaaactgtggaccatagaagctatatcactattggatctaatatctctcaaagggaaattctcaattactgctttaattaatggtgacaatcaatcaatagatataagcaaaccaatcagactcatggaaggtcaaactcatgctcaagcagattatttgctagcattaaatagccttaaattactgtataaagagtatgcaggcataggccacaaattaaaaggaactgagacttatatatcacgagatatgcaatttatgagtaaaacaattcaacataacggtgtatattacccagctagtataaagaaagtcctaagagtgggaccgtggataaacactatacttgatgatttcaaagtgagtctagaatctataggtagtttgacacaagaattagaatatagaggtgaaagtctattatgcagtttaatatttagaaatgtatggttatataatcagattgctctacaattaaaaaatcatgcattatgtaacaataaactatatttggacatattaaaggttctgaaacacttaaaaaccttttttaatcttgataatattgatacagcattaacattgtatatgaatttacccatgttatttggtggtggtgatcccaacttgttatatcgaagtttctatagaagaactcctgacttcctcacagaggctatagttcactctgtgttcatacttagttattatacaaaccatgacttaaaagataaacttcaagatctgtcagatgatagattgaataagttcttaacatgcataatcacgtttgacaaaaaccctaatgctgaattcgtaacattgatgagagatcctcaagctttagggtctgagagacaagctaaaattactagcgaaatcaatagactggcagttacagaggttttgagtacagctccaaacaaaatattctccaaaagtgcacaacattatactactacagagatagatctaaatgatattatgcaaaatatagaacctacatatcctcatgggctaagagttgtttatgaaagtttacccttttataaagcagagaaaatagtaaatcttatatcaggtacaaaatctataactaacatactggaaaaaacttctgccatagacttaacagatattgatagagccactgagatgatgaggaaaaacataactttgcttataaggatacttccattggattgtaacagagataaaagagagatattgagtatggaaaacctaagtattactgaattaagcaaatatgttagggaaagatcttggtctttatccaatatagttggtgttacatcacccagtatcatgtatacaatggacatcaaatatactacaagcactatatctagtggcataattatagagaaatataatgttaacagtttaacacgtggtgagagaggacccactaaaccatgggttggttcatctacacaagagaaaaaaacaatgccagtttataatagacaagtcttaaccaaaaaacagagagatcaaatagatctattagcaaaattggattgggtgtatgcatctatagataacaaggatgaattcatggaagaactcagcataggaacccttgggttaacatatgaaaaggccaagaaattatttccacaatatttaagtgtcaattatttgcatcgccttacagtcagtagtagaccatgtgaattccctgcatcaataccagcttatagaacaacaaattatcactttgacactagccctattaatcgcatattaacagaaaagtatggtgatgaagatattgacatagtattccaaaactgtataagctttggccttagtttaatgtcagtagtagaacaatttactaatgtatgtcctaacagaattattctcatacctaagcttaatgagatacatttgatgaaacctcccatattcacaggtgatgttgatattcacaagttaaaacaagtgatacaaaaacagcatatgtttttaccagacaaaataagtttgactcaatatgtggaattattcttaagtaataaaacactcaaatctggatctcatgttaattctaatttaatattggcacataaaatatctgactattttcataatacttacattttaagtactaatttagctggacattggattctgattatacaacttatgaaagattctaaaggtatttttgaaaaagattggggagagggatatataactgatcatatgtttattaatttgaaagttttcttcaatgcttataagacctatctcttgtgttttcataaaggttatggcaaagcaaagctggagtgtgatatgaacacttcagatcttctatgtgtattggaattaatagacagtagttattggaagtctatgtctaaggtatttttagaacaaaaagttatcaaatacattcttagccaagatgcaagtttacatagagtaaaaggatgtcatagcttcaaattatggtttcttaaacgtcttaatgtagcagaattcacagtttgcccttgggttgttaacatagattatcatccaacacatatgaaagcaatattaacttatatagatcttgttagaatgggattgataaatatagatagaatacacattaaaaataaacacaaattcaatgatgaattttatacttctaatctcttctacattaattataacttctcagataatactcatctattaactaaacatataaggattgctaattctgaattagaaaataattacaacaaattatatcatcctacaccagaaaccctagagaatatactagccaatccgattaaaagtaatgacaaaaagacactgaatgactattgtataggtaaaaatgttgactcaataatgttaccattgttatctaataagaagcttattaaatcgtctgcaatgattagaaccaattacagcaaacaagatttgtataatttattccctatggttgtgattgatagaattatagatcattcaggcaatacagccaaatccaaccaactttacactactacttcccaccaaatatctttagtgcacaatagcacatcactttactgcatgcttccttggcatcatattaatagattcaattttgtatttagttctacaggttgtaaaattagtatagagtatattttaaaagatcttaaaattaaagatcccaattgtatagcattcataggtgaaggagcagggaatttattattgcgtacagtagtggaacttcatcctgacataagatatatttacagaagtctgaaagattgcaatgatcatagtttacctattgagtttttaaggctgtacaatggacatatcaacattgattatggtgaaaatttgaccattcctgctacagatgcaaccaacaacattcattggtcttatttacatataaagtttgctgaacctatcagtctttttgtctgtgatgccgaattgtctgtaacagtcaactggagtaaaattataatagaatggagcaagcatgtaagaaagtgcaagtactgttcctcagttaataaatgtatgttaatagtaaaatatcatgctcaagatgatattgatttcaaattagacaatataactatattaaaaacttatgtatgcttaggcagtaagttaaagggatcggaggtttacttagtccttacaataggtcctgcgaatatattcccagtatttaatgtagtacaaaatgctaaattgatactatcaagaaccaaaaatttcatcatgcctaagaaagctgataaagagtctattgatgcaaatattaaaagtttgataccctttctttgttaccctataacaaaaaaaggaattaatactgcattgtcaaaactaaagagtgttgttagtggagatatactatcatattctatagctggacgtaatgaagttttcagcaataaacttataaatcataagcatatgaacatcttaaaatggttcaatcatgttttaaatttcagatcaacagaactaaactataaccatttatatatggtagaatctacatatccttacctaagtgaattgttaaacagcttgacaaccaatgaacttaaaaaactgattaaaatcacaggtagtctgttatacaactttcataatgaataatgaataaagatcttataataaaaattcccatagctatacactaacactgtattcaattatagttattaaaaattaaaaatcgtacgattttttaaataacttttagtgaactaatcctaaagttatcattttaatcttggaggaataaatttaaaccctaatctaattggtttatatgtgtattaactaaattacgagatattagtttttgacactttttttctcgt

SEQ ID NO: 72 - DNA, 23443 bp, Artificial Sequence
  Description of Artificial Sequence: Synthetic polynucleotide
aaacggatccttcgaaacgaaattaatacgactcactatagggaagtttttcgcgtctgatgaggccgttaggccgaaactcctctccggagtcacgcgaaaaaatgcgtacaacaaacttgcataaaccaaaaaaatggggcaaataagaatttgataagtaccacttaaatttaactcccttgcttagcgatggtgagcgagctgattaaggagaacatgcacatgaagctgtacatggagggcaccgtgaacaaccaccacttcaagtgcacatccgagggcgaaggcaagccctacgagggcacccagaccatgagaatcaaggcggtcgagggcggccctctccccttcgccttcgacatcctggctaccagcttcatgtacggcagcaaaaccttcatcaaccacacccagggcatccccgacttctttaagcagtccttccccgagggcttcacatgggagagagtcaccacatacgaagacgggggcgtgctgaccgctacccaggacaccagcctccaggacggctgcctcatctacaacgtcaagatcagaggggtgaacttcccatccaacggccctgtgatgcagaagaaaacactcggctgggaggcctccaccgagaccctgtaccccgctgacggcggcctggaaggcagagccgacatggccctgaagctcgtgggcgggggccacctgatctgcaacttgaagaccacatacagatccaagaaacccgctaagaacctcaagatgcccggcgtctactatgtggacagaagactggaaagaatcaaggaggccgacaaagagacctacgtcgagcagcacgaggtggctgtggccagatactgcgacctccctagcaaactggggcacagatgagtattcaattatagttattaaaaacttaacagaagacaaaaatggggcaaataagaatttgataagtaccacttaaatttaactcccttgcttagcgatgggttcgaattcgctatcgatgataaaagtacgtctacaaaatctatttgataatgatgaagtagcgctactaaaaataacgtgttatacggataaactaatacatctaacgaatgcgctagcgaaagcggtaatacatacgataaaactaaatggtatagtatttgtacatgtaataacgtcgtcggatatatgtccgaataataatatagtagtaaaatcgaattttacgacgatgccggtactacaaaatggtggttatatatgggaaatgatggaactaacgcattgttcgcaaccgaatggtctactagatgataattgtgaaataaaattttcgaaaaaactatcggattcgacgatgacgaattatatgaatcaactatcggaactactaggttttgatctaaatccgtaaattataattaatatcaactagcaaatcaatgtcactaacaccattagttaatataaaacttaacagaagacaaaaatggggcaaataaatcaattcagccaacccaaccatggatacgacgcataatgataatacgccgcaacgtctaatgataacggatatgcgtccgctatcgctagaaacgataataacgtcgctaacgcgtgatataataacgcataaatttatatatctaataaatcatgaatgtatagtacgtaaactagatgaacgtcaagcgacgtttacgtttctagtaaattatgaaatgaaactactacataaagtaggttcgacgaaatataaaaaatatacggaatataatacgaaatatggtacgtttccgatgccgatatttataaatcatgatggttttctagaatgtataggtataaaaccgacgaaacatacgccgataatatataaatatgatctaaatccgtaaatttcaacacaatattcacacaatctaaaacaacaactctatgcataactatactccatagtccagatggagcctgaaaattatagtaatttaaaattaaggagagatataagatagaagatggggcaaatacaaagatggctcttagcaaagtcaagttgaatgatacactcaacaaagatcaacttctgtcatccagcaaatacaccatccaacggagcacaggagatagtattgatactcctaattatgatgtgcagaaacacatcaataagttatgtggcatgttattaatcacagaagatgctaatcataaattcactgggttaataggtatgttatatgcgatgtctaggttaggaagagaagacaccataaaaatactcagagatgcgggatatcatgtaaaagcaaatggagtagatgtaacaacacatcgtcaagacattaatggaaaagaaatgaaatttgaagtgttaacattggcaagcttaacaactgaaattcaaatcaacattgagatagaatctagaaaatcctacaaaaaaatgctaaaagaaatgggagaggtagctccagaatacaggcatgactctcctgattgtgggatgataatattatgtatagcagcattagtaataactaaattagcagcaggggacagatctggtcttacagccgtgattaggagagctaataatgtcctaaaaaatgaaatgaaacgttacaaaggcttactacccaaggacatagccaacagcttctatgaagtgtttgaaaaacatccccactttatagatgtttttgttcattttggtatagcacaatcttctaccagaggtggcagtagagttgaagggatttttgcaggattgtttatgaatgcctatggtgcagggcaagtgatgttacggtggggagtcttagcaaaatcagttaaaaatattatgttaggacatgctagtgtgcaagcagaaatggaacaagttgttgaggtttatgaatatgcccaaaaattgggtggtgaagcaggattctaccatatattgaacaacccaaaagcatcattattatctttgactcaatttcctcacttctccagtgtagtattaggcaatgctgctggcctaggcataatgggagagtacagaggtacaccgaggaatcaagatctatatgatgcagcaaaggcatatgctgaacaactcaaagaaaatggtgtgattaactacagtgtactagacttgacagcagaagaactagaggctatcaaacatcagcttaatccaaaagataatgatgtagagctttgagttaataaaaaatggggcaaataaatcatcatggaaaagtttgctcctgaattccatggagaagatgcaaacaacagggctactaaattcctagaatcaataaagggcaaattcacatcacccaaagatcccaagaaaaaagatagtatcatatctgtcaactcaatagatatagaagtaaccaaagaaagccctataacatcaaattcaactattatcaacccaacaaatgagacagatgatactgcagggaacaagcccaattatcaaagaaaacctctagtaagtttcaaagaagaccctacaccaagtgataatcccttttctaaactatacaaagaaaccatagaaacatttgataacaatgaagaagaatccagctattcatacgaagaaataaatgatcagacaaacgataatataacagcaagattagataggattgatgaaaaattaagtgaaatactaggaatgcttcacacattagtagtggcaagtgcaggacctacatctgctcgggatggtataagagatgccatgattggtttaagagaagaaatgatagaaaaaatcagaactgaagcattaatgaccaatgacagattagaagctatggcaagactcaggaatgaggaaagtgaaaagatggcaaaagacacatcagatgaagtgtctctcaatccaacatcagagaaattgaacaacctattggaagggaatgatagtgacaatgatctatcacttgaagatttctgattagttaccactcttcacatcaacacacaataccaacagaagaccaacaaactaaccaacccaatcatccaaccaaacatccatccgccaatcagccaaacagccaacaaaacaaccagccaatccaaaactaaccacccggaaaaaatctataatatagttacaaaaaaaggaaagggtggggcaaatatggaaacatacgtgaacaagcttcacgaaggctccacatacacagctgctgttcaatacaatgtcttagaaaaagacgatgaccctgcatcacttacaatatgggtgcccatgttccaatcatctatgccagcagatttacttataaaagaactagctaatgtcaacatactagtgaaacaaatatccacacccaagggaccttcactaagagtcatgataaactcaagaagtgcagtgctagcacaaatgcccagcaaatttaccatatgcgctaatgtgtccttggatgaaagaagcaaactagcatatgatgtaaccacaccctgtgaaatcaaggcatgtagtctaacatgcctaaaatcaaaaaatatgttgactacagttaaagatctcactatgaagacactcaaccctacacatgatattattgctttatgtgaatttgaaaacatagtaacatcaaaaaaagtcataataccaacatacctaagatccatcagtgtcagaaataaagatctgaacacacttgaaaatataacaaccactgaattcaaaaatgctatcacaaatgcaaaaatcatcccttactcaggattactattagtcatcacagtgactgacaacaaaggagcattcaaatacataaagccacaaagtcaattcatagtagatcttggagcttacctagaaaaagaaagtatatattatgttaccacaaattggaagcacacagctacacgatttgcaatcaaacccatggaagattaacctttttcctctacatcagtgtgttaattcatacaaactttctacctacattcttcacttcaccatcacaatcacaaacactctgtggttcaaccaatcaaacaaaacttatctgaagtcccagatcatcccaagtcattgtttatcagatctagtactcaaataagttaataaaaaatatacacatggacgtccatggggcaaatgcaaacatgtttgtttttcttgttttattgccactagtctctagtcagtgtgttaatcttacaaccagaactcaattaccccctgcatacactaattctttcacacgtggtgtttattaccctgacaaagttttcagatcctcagttttacattcaactcaggacttgttcttacctttcttttccaatgttacttggttccatgctatctctgggaccaatggtactaagaggtttgataaccctgtcctaccatttaatgatggtgtttattttgcttccactgagaagtctaacataataagaggctggatttttggtactactttagattcgaagacccagtccctacttattgttaataacgctactaatgttgttattaaagtctgtgaatttcaattttgtaatgatccatttttgggtgtttaccacaaaaacaacaaaagttggatggaaagtgagttcagagtttattctagtgcgaataattgcacttttgaatatgtctctcagccttttcttatggaccttgaaggaaaacagggtaatttcaaaaatcttagggaatttgtgtttaagaatattgatggttattttaaaatatattctaagcacacgcctattaatttagtgcgtgatctccctcagggtttttcggctttagaaccattggtagatttgccaataggtattaacatcactaggtttcaaactttacttgctttacatagaagttatttgactcctggtgattcttcttcaggttggacagctggtgctgcagcttattatgtgggttatcttcaacctaggacttttctattaaaatataatgaaaatggaaccattacagatgctgtagactgtgcacttgaccctctctcagaaacaaagtgtacgttgaaatccttcactgtagaaaaaggaatctatcaaacttctaactttagagtccaaccaacagaatctattgttagatttcctaatattacaaacttgtgcccttttggtgaagtttttaacgccaccagatttgcatctgtttatgcttggaacaggaagagaatcagcaactgtgttgctgattattctgtcctatataattccgcatcattttccacttttaagtgttatggagtgtctcctactaaattaaatgatctctgctttactaatgtctatgcagattcatttgtaattagaggtgatgaagtcagacaaatcgctccagggcaaactggaaagattgctgattataattataaattaccagatgattttacaggctgcgttatagcttggaattctaacaatcttgattctaaggttggtggtaattataattacctgtatagattgtttaggaagtctaatctcaaaccttttgagagagatatttcaactgaaatctatcaggccggtagcacaccttgtaatggtgttgaaggttttaattgttactttcctttacaatcatatggtttccaacccacttatggtgttggttaccaaccatacagagtagtagtactttcttttgaacttctacatgcaccagcaactgtttgtggacctaaaaagtctactaatttggttaaaaacaaatgtgtcaatttcaacttcaatggtttaacaggcacaggtgttcttactgagtctaacaaaaagtttctgcctttccaacaatttggcagagacattgatgacactactgatgctgtccgtgatccacagacacttgagattcttgacattacaccatgttcttttggtggtgtcagtgttataacaccaggaacaaatacttctaaccaggttgctgttctttatcagggtgttaactgcacagaagtccctgttgctattcatgcagatcaacttactcctacttggcgtgtttattctacaggttctaatgtttttcaaacacgtgcaggctgtttaataggggctgaacatgtcaacaactcatatgagtgtgacatacccattggtgcaggtatatgcgctagttatcagactcagactaattctcatcggcgggcacgtagtgtagctagtcaatccatcattgcctacactatgtcacttggtgcagaaaattcagttgcttactctaataactctattgccatacccataaattttactattagtgttaccacagaaattctaccagtgtctatgaccaagacatcagtagattgtacaatgtacatttgtggtgattcaactgaatgcagcaatcttttgttgcaatatggcagtttttgtacacaattaaaccgtgctttaactggaatagctgttgaacaagacaaaaacacccaagaagtttttgcacaagtcaaacaaatttacaaaacaccaccaattaaagattttggtggttttaatttttcacaaatattaccagatccatcaaaaccaagcaagaggtcatttattgaagatctacttttcaacaaagtgacacttgcagatgctggcttcatcaaacaatatggtgattgccttggtgatattgctgctagagacctcatttgtgcacaaaagtttaacggccttactgttttgccacctttgctcacagatgaaatgattgctcaatacacttctgcactgttagcgggtacaatcacttctggttggacctttggtgcaggtgctgcattacaaataccatttgctatgcaaatggcttataggtttaatggtattggagttacacagaatgttctctatgagaaccaaaaattgattgccaaccaatttaatagtgctattggcaaaattcaagactcactttcttccacagcaagtgcacttggaaaacttcaagatgtggtcaaccaaaatgcacaagctttaaacacgcttgttaaacaacttagctccaattttggtgcaatttcaagtgttttaaatgatatccttgcacgtcttgacaaagttgaggctgaagtgcaaattgataggttgatcacaggcagacttcaaagtttgcagacatatgtgactcaacaattaattagagctgcagaaatcagagcttctgctaatcttgctgctactaaaatgtcagagtgtgtacttggacaatcaaaaagagttgatttttgtggaaagggctatcatcttatgtccttccctcagtcagcacctcatggtgtagtcttcttgcatgtgacttatgtccctgcacaagaaaagaacttcacaactgctcctgccatttgtcatgatggaaaagcacactttcctcgtgaaggtgtctttgtttcaaatggcacacactggtttgtaacacaaaggaatttttatgaaccacaaatcattactacacacaacacatttgtgtctggtaactgtgatgttgtaataggaattgtcaacaacacagtttatgatcctttgcaacctgaattagactcattcaaggaggagttagataaatattttaagaatcatacatcaccagatgttgatttaggtgacatctctggcattaatgcttcagttgtaaacattcaaaaagaaattgaccgcctcaatgaggttgccaagaatttaaatgaatctctcatcgatctccaagaacttggaaagtatgagcagtatataaaatggccatggtacatttggctaggttttatagctggcttgattgccatagtaatggtgacaattatgctttgctgtatgaccagttgctgtagttgtctcaagggctgttgttcttgtggatcctgctgcaaatttgatgaagacgacggactgctcctatactgtaaggccagaagcacaccaatcacactaagcaaggatcaactgagtggtataaataatattgcatttagtaactaaataaaaatagcacctaatcatgttcttacaatggtttactatctgctcatagacaacccatctatcattggattttcttaaaatctgaacttcatcgaaactcttatctataaaccatctcacttacactatttaagtagattcctagtttatagttatataaaacacaattgaatgccagtcgaccttaccatctgtaaaaatgaaaactggggcaaatatgtcacgaaggaatccttgcaaatttgaaattcgaggtcattgcttaaatggtaagaggtgtcattttagtcataattattttgaatggccaccccatgcactgcttgtaagacaaaactttatgttaaacagaatacttaagtctatggataaaagtatagataccttatcagaaataagtggagctgcagagttggacagaacagaagagtatgctcttggtgtagttggagtgctagagagttatataggatcaataaacaatataactaaacaatcagcatgtgttgccatgagcaaactcctcactgaactcaatagtgatgatatcaaaaagctgagggacaatgaagagctaaattcacccaagataagagtgtacaatactgtcatatcatatattgaaagcaacaggaaaaacaataaacaaactatccatctgttaaaaagattgccagcagacgtattgaagaaaaccatcaaaaacacattggatatccataagagcataaccatcaacaacccaaaagaatcaactgttagtgatacaaatgaccatgccaaaaataatgatactacctgacaaatatccttgtagtataacttccatactaataacaagtagatgtagagttactatgtataatcaaaagaacacactatatttcaatcaaaacaacccaaataaccatatgtactcaccgaatcaaacattcaatgaaatccattggacctctcaagaattgattgacacaattcaaaattttctacaacatctaggtattattgaggatatatatacaatatatatattagtgtcataacactcaattctaacactcaccacatcgttacattattaattcaaacaattcaagttgtgggacaaaatggatcccattattaatggaaattctgctaatgtttatctaaccgatagttatttaaaaggtgttatctctttctcagagtgtaatgctttaggaagttacatattcaatggtccttatctcaaaaatgattataccaacttaattagtagacaaaatccattaatagaacacatgaatctaaagaaactaaatataacacagtccttaatatctaagtatcataaaggtgaaataaaattagaagaacctacttattttcagtcattacttatgacatacaagagtatgacctcgtcagaacagattgctaccactaatttacttaaaaagataataagaagagctatagaaataagtgatgtcaaagtctatgctatattgaataaactagggcttaaagaaaaggacaagattaaatccaacaatggacaagatgaagacaactcagttattacgaccataatcaaagatgatatactttcagctgttaaagataatcaatctcatcttaaagcagacaaaaatcactctacaaaacaaaaagacacaatcaaaacaacactcttgaagaaattgatgtgttcaatgcaacatcctccatcatggttaatacattggtttaacttatacacaaaattaaacaacatattaacacagtatcgatcaaatgaggtaaaaaaccatgggtttacattgatagataatcaaactcttagtggatttcaatttattttgaaccaatatggttgtatagtttatcataaggaactcaaaagaattactgtgacaacctataatcaattcttgacatggaaagatattagccttagtagattaaatgtttgtttaattacatggattagtaactgcttgaacacattaaataaaagcttaggcttaagatgcggattcaataatgttatcttgacacaactattcctttatggagattgtatactaaagctatttcacaatgaggggttctacataataaaagaggtagagggatttattatgtctctaattttaaatataacagaagaagatcaattcagaaaacgattttataatagtatgctcaacaacatcacagatgctgctaataaagctcagaaaaatctgctatcaagagtatgtcatacattattagataagacagtgtccgataatataataaatggcagatggataattctattaagtaagttccttaaattaattaagcttgcaggtgacaataaccttaacaatctgagtgaactatattttttgttcagaatatttggacacccaatggtagatgaaagacaagccatggatgctgttaaaattaattgcaatgagaccaaattttacttgttaagcagtctgagtatgttaagaggtgcctttatatatagaattataaaagggtttgtaaataattacaacagatggcctactttaagaaatgctattgttttacccttaagatggttaacttactataaactaaacacttatccttctttgttggaacttacagaaagagatttgattgtgttatcaggactacgtttctatcgtgagtttcggttgcctaaaaaagtggatcttgaaatgattataaatgataaagctatatcacctcctaaaaatttgatatggactagtttccctagaaattacatgccatcacacatacaaaactatatagaacatgaaaaattaaaattttccgagagtgataaatcaagaagagtattagagtattatttaagagataacaaattcaatgaatgtgatttatacaactgtgtagttaatcaaagttatctcaacaaccctaatcatgtggtatcattgacaggcaaagaaagagaactcagtgtaggtagaatgtttgcaatgcaaccgggaatgttcagacaggttcaaatattggcagagaaaatgatagctgaaaacattttacaattctttcctgaaagtcttacaagatatggtgatctagaactacaaaaaatattagaattgaaagcaggaataagtaacaaatcaaatcgctacaatgataattacaacaattacattagtaagtgctctatcatcacagatctcagcaaattcaatcaagcatttcgatatgaaacgtcatgtatttgtagtgatgtgctggatgaactgcatggtgtacaatctctattttcctggttacatttaactattcctcatgtcacaataatatgcacatataggcatgcacccccctatataggagatcatattgtagatcttaacaatgtagatgaacaaagtggattatatagatatcacatgggtggcatcgaagggtggtgtcaaaaactgtggaccatagaagctatatcactattggatctaatatctctcaaagggaaattctcaattactgctttaattaatggtgacaatcaatcaatagatataagcaaaccaatcagactcatggaaggtcaaactcatgctcaagcagattatttgctagcattaaatagccttaaattactgtataaagagtatgcaggcataggccacaaattaaaaggaactgagacttatatatcacgagatatgcaatttatgagtaaaacaattcaacataacggtgtatattacccagctagtataaagaaagtcctaagagtgggaccgtggataaacactatacttgatgatttcaaagtgagtctagaatctataggtagtttgacacaagaattagaatatagaggtgaaagtctattatgcagtttaatatttagaaatgtatggttatataatcagattgctctacaattaaaaaatcatgcattatgtaacaataaactatatttggacatattaaaggttctgaaacacttaaaaaccttttttaatcttgataatattgatacagcattaacattgtatatgaatttacccatgttatttggtggtggtgatcccaacttgttatatcgaagtttctatagaagaactcctgacttcctcacagaggctatagttcactctgtgttcatacttagttattatacaaaccatgacttaaaagataaacttcaagatctgtcagatgatagattgaataagttcttaacatgcataatcacgtttgacaaaaaccctaatgctgaattcgtaacattgatgagagatcctcaagctttagggtctgagagacaagctaaaattactagcgaaatcaatagactggcagttacagaggttttgagtacagctccaaacaaaatattctccaaaagtgcacaacattatactactacagagatagatctaaatgatattatgcaaaatatagaacctacatatcctcatgggctaagagttgtttatgaaagtttacccttttataaagcagagaaaatagtaaatcttatatcaggtacaaaatctataactaacatactggaaaaaacttctgccatagacttaacagatattgatagagccactgagatgatgaggaaaaacataactttgcttataaggatacttccattggattgtaacagagataaaagagagatattgagtatggaaaacctaagtattactgaattaagcaaatatgttagggaaagatcttggtctttatccaatatagttggtgttacatcacccagtatcatgtatacaatggacatcaaatatactacaagcactatatctagtggcataattatagagaaatataatgttaacagtttaacacgtggtgagagaggacccactaaaccatgggttggttcatctacacaagagaaaaaaacaatgccagtttataatagacaagtcttaaccaaaaaacagagagatcaaatagatctattagcaaaattggattgggtgtatgcatctatagataacaaggatgaattcatggaagaactcagcataggaacccttgggttaacatatgaaaaggccaagaaattatttccacaatatttaagtgtcaattatttgcatcgccttacagtcagtagtagaccatgtgaattccctgcatcaataccagcttatagaacaacaaattatcactttgacactagccctattaatcgcatattaacagaaaagtatggtgatgaagatattgacatagtattccaaaactgtataagctttggccttagtttaatgtcagtagtagaacaatttactaatgtatgtcctaacagaattattctcatacctaagcttaatgagatacatttgatgaaacctcccatattcacaggtgatgttgatattcacaagttaaaacaagtgatacaaaaacagcatatgtttttaccagacaaaataagtttgactcaatatgtggaattattcttaagtaataaaacactcaaatctggatctcatgttaattctaatttaatattggcacataaaatatctgactattttcataatacttacattttaagtactaatttagctggacattggattctgattatacaacttatgaaagattctaaaggtatttttgaaaaagattggggagagggatatataactgatcatatgtttattaatttgaaagttttcttcaatgcttataagacctatctcttgtgttttcataaaggttatggcaaagcaaagctggagtgtgatatgaacacttcagatcttctatgtgtattggaattaatagacagtagttattggaagtctatgtctaaggtatttttagaacaaaaagttatcaaatacattcttagccaagatgcaagtttacatagagtaaaaggatgtcatagcttcaaattatggtttcttaaacgtcttaatgtagcagaattcacagtttgcccttgggttgttaacatagattatcatccaacacatatgaaagcaatattaacttatatagatcttgttagaatgggattgataaatatagatagaatacacattaaaaataaacacaaattcaatgatgaattttatacttctaatctcttctacattaattataacttctcagataatactcatctattaactaaacatataaggattgctaattctgaattagaaaataattacaacaaattatatcatcctacaccagaaaccctagagaatatactagccaatccgattaaaagtaatgacaaaaagacactgaatgactattgtataggtaaaaatgttgactcaataatgttaccattgttatctaataagaagcttattaaatcgtctgcaatgattagaaccaattacagcaaacaagatttgtataatttattccctatggttgtgattgatagaattatagatcattcaggcaatacagccaaatccaaccaactttacactactacttcccaccaaatatctttagtgcacaatagcacatcactttactgcatgcttccttggcatcatattaatagattcaattttgtatttagttctacaggttgtaaaattagtatagagtatattttaaaagatcttaaaattaaagatcccaattgtatagcattcataggtgaaggagcagggaatttattattgcgtacagtagtggaacttcatcctgacataagatatatttacagaagtctgaaagattgcaatgatcatagtttacctattgagtttttaaggctgtacaatggacatatcaacattgattatggtgaaaatttgaccattcctgctacagatgcaaccaacaacattcattggtcttatttacatataaagtttgctgaacctatcagtctttttgtctgtgatgccgaattgtctgtaacagtcaactggagtaaaattataatagaatggagcaagcatgtaagaaagtgcaagtactgttcctcagttaataaatgtatgttaatagtaaaatatcatgctcaagatgatattgatttcaaattagacaatataactatattaaaaacttatgtatgcttaggcagtaagttaaagggatcggaggtttacttagtccttacaataggtcctgcgaatatattcccagtatttaatgtagtacaaaatgctaaattgatactatcaagaaccaaaaatttcatcatgcctaagaaagctgataaagagtctattgatgcaaatattaaaagtttgataccctttctttgttaccctataacaaaaaaaggaattaatactgcattgtcaaaactaaagagtgttgttagtggagatatactatcatattctatagctggacgtaatgaagttttcagcaataaacttataaatcataagcatatgaacatcttaaaatggttcaatcatgttttaaatttcagatcaacagaactaaactataaccatttatatatggtagaatctacatatccttacctaagtgaattgttaaacagcttgacaaccaatgaacttaaaaaactgattaaaatcacaggtagtctgttatacaactttcataatgaataatgaataaagatcttataataaaaattcccatagctatacactaacactgtattcaattatagttattaaaaattaaaaatcgtacgattttttaaataacttttagtgaactaatcctaaagttatcattttaatcttggaggaataaatttaaaccctaatctaattggtttatatgtgtattaactaaattacgagatattagtttttgacactttttttctcgtgggtcggcatggcatctccacctcctcgcggtccgacctgggcatccgaaggaggacgcacgtccactcggatggctaagggagctgctaacaaagcccgaaaggaagctgagttggctgctgccaccgctgagcaataactagcataaccccttggggcctctaaacgggtcttgaggggttttttgctgaaaggaggaactatatacgcgtaagcttctcgacccattctcatgtttgacagcttatcatcgaatttctgccattcatccgcttattatcacttattcaggcgtagcaaccaggcgtttaagggcaccaataactgccttaaaaaaattacgccccgccctgccactcatcgcagtactgttgtaattcattaagcattctgccgacatggaagccatcacagacggcatgatgaacctgaatcgccagcggcatcagcaccttgtcgccttgcgtataatatttgcccatggtgaaaacgggggcgaagaagttgtccatattggccacgtttaaatcaaaactggtgaaactcacccagggattggctgagacgaaaaacatattctcaataaaccctttagggaaataggccaggttttcaccgtaacacgccacatcttgcgaatatatgtgtagaaactgccggaaatcgtcgtggtattcactccagagcgatgaaaacgtttcagtttgctcatggaaaacggtgtaacaagggtgaacactatcccatatcaccagctcaccgtctttcattgccatacggaattccggatgagcattcatcaggcgggcaagaatgtgaataaaggccggataaaacttgtgcttatttttctttacggtctttaaaaaggccgtaatatccagctgaacggtctggttataggtacattgagcaactgactgaaatgcctcaaaatgttctttacgatgccattgggatatatcaacggtggtatatccagtgatttttttctccattttagcttccttagctcctgaaaatctcgataactcaaaaaatacgcccggtagtgatcttatttcattatggtgaaagttggaacctcttacgtgccgatcaacgtctcattttcgccaaaagttggcccagggcttcccggtatcaacagggacaccaggatttatttattctgcgaagtgatcttccgtcacaggtatttattcgcgataagctcatggagcggcgtaaccgtcgcacaggaaggacagagaaagcgcggatctgggaagtgacggacagaacggtcaggacctggattggggaggcggttgccgccgctgctgctgacggtgtgacgttctctgttccggtcacaccacatacgttccgccattcctatgcgatgcacatgctgtatgccggtataccgctgaaagttctgcaaagcctgatgggacataagtccatcagttcaacggaagtctacacgaaggtttttgcgctggatgtggctgcccggcaccgggtgcagtttgcgatgccggagtctgatgcggttgcgatgctgaaacaattatcctgagaataaatgccttggcctttatatggaaatgtggaactgagtggatatgctgtttttgtctgttaaacagagaagctggctgttatccactgagaagcgaacgaaacagtcgggaaaatctcccattatcgtagagatccgcattattaatctcaggagcctgtgtagcgtttataggaagtagtgttctgtcatgatgcctgcaagcggtaacgaaaacgatttgaatatgccttcaggaacaatagaaatcttcgtgcggtgttacgttgaagtggagcggattatgtcagcaatggacagaacaacctaatgaacacagaaccatgatgtggtctgtccttttacagccagtaggctcgccgcagtcgagcgacggcgaagccctcgagtgagcgaggaagcaccagggaacagcacttatatattctgcttacacacgatgcctgaaaaaacttcccttggggttatccacttatccacggggatatttttataattattttttttatagtttttagatcttcttttttagagcgccttgtaggcctttatccatgctggttctagagaaggtgttgtgacaaattgccctttcagtgtgacaaatcaccctcaaatgacagtcctgtctgtgacaaattgcccttaaccctgtgacaaattgccctcagaagaagctgttttttcacaaagttatccctgcttattgactcttttttatttagtgtgacaatctaaaaacttgtcacacttcacatggatctgtcatggcggaaacagcggttatcaatcacaagaaacgtaaaaatagcccgcgaatcgtccagtcaaacgacctcactgaggcggcatatagtctctcccgggatcaaaaacgtatgctgtatctgttcgttgaccagatcagaaaatctgatggcaccctacaggaacatgacggtatctgcgagatccatgttgctaaatatgctgaaatattcggattgacctctgcggaagccagtaaggatatacggcaggcattgaagagtttcgcggggaaggaagtggttttttatcgccctgaagaggatgccggcgatgaaaaaggctatgaatcttttccttggtttatcaaacgtgcgcacagtccatccagagggctttacagtgtacatatcaacccatatctcattcccttctttatcgggttacagaaccggtttacgcagtttcggcttagtgaaacaaaagaaatcaccaatccgtatgccatgcgtttatacgaatccctgtgtcagtatcgtaagccggatggctcaggcatcgtctctctgaaaatcgactggatcatagagcgttaccagctgcctcaaagttaccagcgtatgcctgacttccgccgccgcttcctgcaggtctgtgttaatgagatcaacagcagaactccaatgcgcctctcatacattgagaaaaagaaaggccgccagacgactcatatcgtattttccttccgcgatatcacttccatgacgacaggatagtctgagggttatctgtcacagatttgagggtggttcgtcacatttgttctgacctactgagggtaatttgtcacagttttgctgtttccttcagcctgcatggattttctcatactttttgaactgtaatttttaaggaagccaaatttgagggcagtttgtcacagttgatttccttctctttcccttcgtcatgtgacctgatatcgggggttagttcgtcatcattgatgagggttgattatcacagtttattactctgaattggctatccgcgtgtgtacctctacctggagtttttcccacggtggatatttcttcttgcgctgagcgtaagagctatctgacagaacagttcttctttgcttcctcgccagttcgctcgctatgctcggttacacggctgcggcgagcgctagtgataataagtgactgaggtatgtgctcttcttatctccttttgtagtgttgctcttattttaaacaactttgcggttttttgatgactttgcgattttgttgttgctttgcagtaaattgcaagatttaataaaaaaacgcaaagcaatgattaaaggatgttcagaatgaaactcatggaaacacttaaccagtgcataaacgctggtcatgaaatgacgaaggctatcgccattgcacagtttaatgatgacagcccggaagcgaggaaaataacccggcgctggagaataggtgaagcagcggatttagttggggtttcttctcaggctatcagagatgccgagaaagcagggcgactaccgcacccggatatggaaattcgaggacgggttgagcaacgtgttggttatacaattgaacaaattaatcatatgcgtgatgtgtttggtacgcgattgcgacgtgctgaagacgtatttccaccggtgatcggggttgctgcccataaaggtggcgtttacaaaacctcagtttctgttcatcttgctcaggatctggctctgaaggggctacgtgttttgctcgtggaaggtaacgacccccagggaacagcctcaatgtatcacggatgggtaccagatcttcatattcatgcagaagacactctcctgcctttctatcttggggaaaaggacgatgtcacttatgcaataaagcccacttgctggccggggcttgacattattccttcctgtctggctctgcaccgtattgaaactgagttaatgggcaaatttgatgaaggtaaactgcccaccgatccacacctgatgctccgactggccattgaaactgttgctcatgactatgatgtcatagttattgacagcgcgcctaacctgggtatcggcacgattaatgtcgtatgtgctgctgatgtgctgattgttcccacgcctgctgagttgtttgactacacctccgcactgcagtttttcgatatgcttcgtgatctgctcaagaacgttgatcttaaagggttcgagcctgatgtacgtattttgcttaccaaatacagcaatagtaatggctctcagtccccgtggatggaggagcaaattcgggatgcctggggaagcatggttctaaaaaatgttgtacgtgaaacggatgaagttggtaaaggtcagatccggatgagaactgtttttgaacaggccattgatcaacgctcttcaactggtgcctggagaaatgctctttctatttgggaacctgtctgcaatgaaattttcgatcgtctgattaaaccacgctgggagattagataatgaagcgtgcgcctgttattccaaaacatacgctcaatactcaaccggttgaagatacttcgttatcgacaccagctgccccgatggtggattcgttaattgcgcgcgtaggagtaatggctcgcggtaatgccattactttgcctgtatgtggtcgggatgtgaagtttactcttgaagtgctccggggtgatagtgttgagaagacctctcgggtatggtcaggtaatgaacgtgaccaggagctgcttactgaggacgcactggatgatctcatcccttcttttctactgactggtcaacagacaccggcgttcggtcgaagagtatctggtgtcatagaaattgccgatgggagtcgccgtcgtaaagctgctgcacttaccgaaagtgattatcgtgttctggttggcgagctggatgatgagcagatggctgcattatccagattgggtaacgattatcgcccaacaagtgcttatgaacgtggtcagcgttatgcaagccgattgcagaatgaatttgctggaaatatttctgcgctggctgatgcggaaaatatttcacgtaagattattacccgctgtatcaacaccgccaaattgcctaaatcagttgttgctcttttttctcaccccggtgaactatctgcccggtcaggtgatgcacttcaaaaagcctttacagataaagaggaattacttaagcagcaggcatctaaccttcatgagcagaaaaaagctggggtgatatttgaagctgaagaagttatcactcttttaacttctgtgcttaaaacgtcatctgcatcaagaactagtttaagctcacgacatcagtttgctcctggagcgacagtattgtataagggcgataaaatggtgcttaacctggacaggtctcgtgttccaactgagtgtatagagaaaattgaggccattcttaaggaacttgaaaagccagcaccctgatgcgaccacgttttagtctacgtttatctgtctttacttaatgtcctttgttacaggccagaaagcataactggcctgaatattctctctgggcccactgttccacttgtatcgtcggtctgataatcagactgggaccacggtcccactcgtatcgtcggtctgattattagtctgggaccacggtcccactcgtatcgtcggtctgattattagtctgggaccacggtcccactcgtatcgtcggtctgataatcagactgggaccacggtcccactcgtatcgtcggtctgattattagtctgggaccatggtcccactcgtatcgtcggtctgattattagtctgggaccacggtcccactcgtatcgtcggtctgattattagtctggaaccacggtcccactcgtatcgtcggtctgattattagtctgggaccacggtcccactcgtatcgtcggtctgattattagtctgggaccacgatcccactcgtgttgtcggtctgattatcggtctgggaccacggtcccacttgtattgtcgatcagactatcagcgtgagactacgattccatcaatgcctgtcaagggcaagtattgacatgtcgtcgtaacctgtagaacggagtaacctcggtgtgcggttgtatgcctgctgtggattgctgctgtgtcctgcttatccacaacattttgcgcacggttatgtggacaaaatacctggttacccaggccgtgccggcacgttaaccgggctgcatccgatgcaagtgtgtcgctgtcgagttt

SEQ ID NO: 73 - DNA, 22647 bp, Artificial Sequence
  Description of Artificial Sequence: Synthetic polynucleotide
aaacggatccttcgaaacgaaattaatacgactcactatagggaagtttttcgcgtctgatgaggccgttaggccgaaactcctctccggagtcacgcgaaaaaatgcgtacaacaaacttgcataaaccaaaaaaatggggcaaataagaatttgataagtaccacttaaatttaactcccttgcttagcgatgggttcgaattcgctatcgatgataaaagtacgtctacaaaatctatttgataatgatgaagtagcgctactaaaaataacgtgttatacggataaactaatacatctaacgaatgcgctagcgaaagcggtaatacatacgataaaactaaatggtatagtatttgtacatgtaataacgtcgtcggatatatgtccgaataataatatagtagtaaaatcgaattttacgacgatgccggtactacaaaatggtggttatatatgggaaatgatggaactaacgcattgttcgcaaccgaatggtctactagatgataattgtgaaataaaattttcgaaaaaactatcggattcgacgatgacgaattatatgaatcaactatcggaactactaggttttgatctaaatccgtaaattataattaatatcaactagcaaatcaatgtcactaacaccattagttaatataaaacttaacagaagacaaaaatggggcaaataaatcaattcagccaacccaaccatggatacgacgcataatgataatacgccgcaacgtctaatgataacggatatgcgtccgctatcgctagaaacgataataacgtcgctaacgcgtgatataataacgcataaatttatatatctaataaatcatgaatgtatagtacgtaaactagatgaacgtcaagcgacgtttacgtttctagtaaattatgaaatgaaactactacataaagtaggttcgacgaaatataaaaaatatacggaatataatacgaaatatggtacgtttccgatgccgatatttataaatcatgatggttttctagaatgtataggtataaaaccgacgaaacatacgccgataatatataaatatgatctaaatccgtaaatttcaacacaatattcacacaatctaaaacaacaactctatgcataactatactccatagtccagatggagcctgaaaattatagtaatttaaaattaaggagagatataagatagaagatggggcaaatacaaagatggctcttagcaaagtcaagttgaatgatacactcaacaaagatcaacttctgtcatccagcaaatacaccatccaacggagcacaggagatagtattgatactcctaattatgatgtgcagaaacacatcaataagttatgtggcatgttattaatcacagaagatgctaatcataaattcactgggttaataggtatgttatatgcgatgtctaggttaggaagagaagacaccataaaaatactcagagatgcgggatatcatgtaaaagcaaatggagtagatgtaacaacacatcgtcaagacattaatggaaaagaaatgaaatttgaagtgttaacattggcaagcttaacaactgaaattcaaatcaacattgagatagaatctagaaaatcctacaaaaaaatgctaaaagaaatgggagaggtagctccagaatacaggcatgactctcctgattgtgggatgataatattatgtatagcagcattagtaataactaaattagcagcaggggacagatctggtcttacagccgtgattaggagagctaataatgtcctaaaaaatgaaatgaaacgttacaaaggcttactacccaaggacatagccaacagcttctatgaagtgtttgaaaaacatccccactttatagatgtttttgttcattttggtatagcacaatcttctaccagaggtggcagtagagttgaagggatttttgcaggattgtttatgaatgcctatggtgcagggcaagtgatgttacggtggggagtcttagcaaaatcagttaaaaatattatgttaggacatgctagtgtgcaagcagaaatggaacaagttgttgaggtttatgaatatgcccaaaaattgggtggtgaagcaggattctaccatatattgaacaacccaaaagcatcattattatctttgactcaatttcctcacttctccagtgtagtattaggcaatgctgctggcctaggcataatgggagagtacagaggtacaccgaggaatcaagatctatatgatgcagcaaaggcatatgctgaacaactcaaagaaaatggtgtgattaactacagtgtactagacttgacagcagaagaactagaggctatcaaacatcagcttaatccaaaagataatgatgtagagctttgagttaataaaaaatggggcaaataaatcatcatggaaaagtttgctcctgaattccatggagaagatgcaaacaacagggctactaaattcctagaatcaataaagggcaaattcacatcacccaaagatcccaagaaaaaagatagtatcatatctgtcaactcaatagatatagaagtaaccaaagaaagccctataacatcaaattcaactattatcaacccaacaaatgagacagatgatactgcagggaacaagcccaattatcaaagaaaacctctagtaagtttcaaagaagaccctacaccaagtgataatcccttttctaaactatacaaagaaaccatagaaacatttgataacaatgaagaagaatccagctattcatacgaagaaataaatgatcagacaaacgataatataacagcaagattagataggattgatgaaaaattaagtgaaatactaggaatgcttcacacattagtagtggcaagtgcaggacctacatctgctcgggatggtataagagatgccatgattggtttaagagaagaaatgatagaaaaaatcagaactgaagcattaatgaccaatgacagattagaagctatggcaagactcaggaatgaggaaagtgaaaagatggcaaaagacacatcagatgaagtgtctctcaatccaacatcagagaaattgaacaacctattggaagggaatgatagtgacaatgatctatcacttgaagatttctgattagttaccactcttcacatcaacacacaataccaacagaagaccaacaaactaaccaacccaatcatccaaccaaacatccatccgccaatcagccaaacagccaacaaaacaaccagccaatccaaaactaaccacccggaaaaaatctataatatagttacaaaaaaaggaaagggtggggcaaatatggaaacatacgtgaacaagcttcacgaaggctccacatacacagctgctgttcaatacaatgtcttagaaaaagacgatgaccctgcatcacttacaatatgggtgcccatgttccaatcatctatgccagcagatttacttataaaagaactagctaatgtcaacatactagtgaaacaaatatccacacccaagggaccttcactaagagtcatgataaactcaagaagtgcagtgctagcacaaatgcccagcaaatttaccatatgcgctaatgtgtccttggatgaaagaagcaaactagcatatgatgtaaccacaccctgtgaaatcaaggcatgtagtctaacatgcctaaaatcaaaaaatatgttgactacagttaaagatctcactatgaagacactcaaccctacacatgatattattgctttatgtgaatttgaaaacatagtaacatcaaaaaaagtcataataccaacatacctaagatccatcagtgtcagaaataaagatctgaacacacttgaaaatataacaaccactgaattcaaaaatgctatcacaaatgcaaaaatcatcccttactcaggattactattagtcatcacagtgactgacaacaaaggagcattcaaatacataaagccacaaagtcaattcatagtagatcttggagcttacctagaaaaagaaagtatatattatgttaccacaaattggaagcacacagctacacgatttgcaatcaaacccatggaagattaacctttttcctctacatcagtgtgttaattcatacaaactttctacctacattcttcacttcaccatcacaatcacaaacactctgtggttcaaccaatcaaacaaaacttatctgaagtcccagatcatcccaagtcattgtttatcagatctagtactcaaataagttaataaaaaatatacacatggacgtccatggggcaaatgcaaacatgtttgtttttcttgttttattgccactagtctctagtcagtgtgttaatcttacaaccagaactcaattaccccctgcatacactaattctttcacacgtggtgtttattaccctgacaaagttttcagatcctcagttttacattcaactcaggacttgttcttacctttcttttccaatgttacttggttccatgctatctctgggaccaatggtactaagaggtttgataaccctgtcctaccatttaatgatggtgtttattttgcttccactgagaagtctaacataataagaggctggatttttggtactactttagattcgaagacccagtccctacttattgttaataacgctactaatgttgttattaaagtctgtgaatttcaattttgtaatgatccatttttgggtgtttaccacaaaaacaacaaaagttggatggaaagtgagttcagagtttattctagtgcgaataattgcacttttgaatatgtctctcagccttttcttatggaccttgaaggaaaacagggtaatttcaaaaatcttagggaatttgtgtttaagaatattgatggttattttaaaatatattctaagcacacgcctattaatttagtgcgtgatctccctcagggtttttcggctttagaaccattggtagatttgccaataggtattaacatcactaggtttcaaactttacttgctttacatagaagttatttgactcctggtgattcttcttcaggttggacagctggtgctgcagcttattatgtgggttatcttcaacctaggacttttctattaaaatataatgaaaatggaaccattacagatgctgtagactgtgcacttgaccctctctcagaaacaaagtgtacgttgaaatccttcactgtagaaaaaggaatctatcaaacttctaactttagagtccaaccaacagaatctattgttagatttcctaatattacaaacttgtgcccttttggtgaagtttttaacgccaccagatttgcatctgtttatgcttggaacaggaagagaatcagcaactgtgttgctgattattctgtcctatataattccgcatcattttccacttttaagtgttatggagtgtctcctactaaattaaatgatctctgctttactaatgtctatgcagattcatttgtaattagaggtgatgaagtcagacaaatcgctccagggcaaactggaaagattgctgattataattataaattaccagatgattttacaggctgcgttatagcttggaattctaacaatcttgattctaaggttggtggtaattataattacctgtatagattgtttaggaagtctaatctcaaaccttttgagagagatatttcaactgaaatctatcaggccggtagcacaccttgtaatggtgttgaaggttttaattgttactttcctttacaatcatatggtttccaacccacttatggtgttggttaccaaccatacagagtagtagtactttcttttgaacttctacatgcaccagcaactgtttgtggacctaaaaagtctactaatttggttaaaaacaaatgtgtcaatttcaacttcaatggtttaacaggcacaggtgttcttactgagtctaacaaaaagtttctgcctttccaacaatttggcagagacattgatgacactactgatgctgtccgtgatccacagacacttgagattcttgacattacaccatgttcttttggtggtgtcagtgttataacaccaggaacaaatacttctaaccaggttgctgttctttatcagggtgttaactgcacagaagtccctgttgctattcatgcagatcaacttactcctacttggcgtgtttattctacaggttctaatgtttttcaaacacgtgcaggctgtttaataggggctgaacatgtcaacaactcatatgagtgtgacatacccattggtgcaggtatatgcgctagttatcagactcagactaattctcatcggcgggcacgtagtgtagctagtcaatccatcattgcctacactatgtcacttggtgcagaaaattcagttgcttactctaataactctattgccatacccataaattttactattagtgttaccacagaaattctaccagtgtctatgaccaagacatcagtagattgtacaatgtacatttgtggtgattcaactgaatgcagcaatcttttgttgcaatatggcagtttttgtacacaattaaaccgtgctttaactggaatagctgttgaacaagacaaaaacacccaagaagtttttgcacaagtcaaacaaatttacaaaacaccaccaattaaagattttggtggttttaatttttcacaaatattaccagatccatcaaaaccaagcaagaggtcatttattgaagatctacttttcaacaaagtgacacttgcagatgctggcttcatcaaacaatatggtgattgccttggtgatattgctgctagagacctcatttgtgcacaaaagtttaacggccttactgttttgccacctttgctcacagatgaaatgattgctcaatacacttctgcactgttagcgggtacaatcacttctggttggacctttggtgcaggtgctgcattacaaataccatttgctatgcaaatggcttataggtttaatggtattggagttacacagaatgttctctatgagaaccaaaaattgattgccaaccaatttaatagtgctattggcaaaattcaagactcactttcttccacagcaagtgcacttggaaaacttcaagatgtggtcaaccaaaatgcacaagctttaaacacgcttgttaaacaacttagctccaattttggtgcaatttcaagtgttttaaatgatatccttgcacgtcttgacaaagttgaggctgaagtgcaaattgataggttgatcacaggcagacttcaaagtttgcagacatatgtgactcaacaattaattagagctgcagaaatcagagcttctgctaatcttgctgctactaaaatgtcagagtgtgtacttggacaatcaaaaagagttgatttttgtggaaagggctatcatcttatgtccttccctcagtcagcacctcatggtgtagtcttcttgcatgtgacttatgtccctgcacaagaaaagaacttcacaactgctcctgccatttgtcatgatggaaaagcacactttcctcgtgaaggtgtctttgtttcaaatggcacacactggtttgtaacacaaaggaatttttatgaaccacaaatcattactacacacaacacatttgtgtctggtaactgtgatgttgtaataggaattgtcaacaacacagtttatgatcctttgcaacctgaattagactcattcaaggaggagttagataaatattttaagaatcatacatcaccagatgttgatttaggtgacatctctggcattaatgcttcagttgtaaacattcaaaaagaaattgaccgcctcaatgaggttgccaagaatttaaatgaatctctcatcgatctccaagaacttggaaagtatgagcagtatataaaatggccatggtacatttggctaggttttatagctggcttgattgccatagtaatggtgacaattatgctttgctgtatgaccagttgctgtagttgtctcaagggctgttgttcttgtggatcctgctgcaaatttgatgaagacgacggactgctcctatactgtaaggccagaagcacaccaatcacactaagcaaggatcaactgagtggtataaataatattgcatttagtaactaaataaaaatagcacctaatcatgttcttacaatggtttactatctgctcatagacaacccatctatcattggattttcttaaaatctgaacttcatcgaaactcttatctataaaccatctcacttacactatttaagtagattcctagtttatagttatataaaacacaattgaatgccagtcgaccttaccatctgtaaaaatgaaaactggggcaaatatgtcacgaaggaatccttgcaaatttgaaattcgaggtcattgcttaaatggtaagaggtgtcattttagtcataattattttgaatggccaccccatgcactgcttgtaagacaaaactttatgttaaacagaatacttaagtctatggataaaagtatagataccttatcagaaataagtggagctgcagagttggacagaacagaagagtatgctcttggtgtagttggagtgctagagagttatataggatcaataaacaatataactaaacaatcagcatgtgttgccatgagcaaactcctcactgaactcaatagtgatgatatcaaaaagctgagggacaatgaagagctaaattcacccaagataagagtgtacaatactgtcatatcatatattgaaagcaacaggaaaaacaataaacaaactatccatctgttaaaaagattgccagcagacgtattgaagaaaaccatcaaaaacacattggatatccataagagcataaccatcaacaacccaaaagaatcaactgttagtgatacaaatgaccatgccaaaaataatgatactacctgacaaatatccttgtagtataacttccatactaataacaagtagatgtagagttactatgtataatcaaaagaacacactatatttcaatcaaaacaacccaaataaccatatgtactcaccgaatcaaacattcaatgaaatccattggacctctcaagaattgattgacacaattcaaaattttctacaacatctaggtattattgaggatatatatacaatatatatattagtgtcataacactcaattctaacactcaccacatcgttacattattaattcaaacaattcaagttgtgggacaaaatggatcccattattaatggaaattctgctaatgtttatctaaccgatagttatttaaaaggtgttatctctttctcagagtgtaatgctttaggaagttacatattcaatggtccttatctcaaaaatgattataccaacttaattagtagacaaaatccattaatagaacacatgaatctaaagaaactaaatataacacagtccttaatatctaagtatcataaaggtgaaataaaattagaagaacctacttattttcagtcattacttatgacatacaagagtatgacctcgtcagaacagattgctaccactaatttacttaaaaagataataagaagagctatagaaataagtgatgtcaaagtctatgctatattgaataaactagggcttaaagaaaaggacaagattaaatccaacaatggacaagatgaagacaactcagttattacgaccataatcaaagatgatatactttcagctgttaaagataatcaatctcatcttaaagcagacaaaaatcactctacaaaacaaaaagacacaatcaaaacaacactcttgaagaaattgatgtgttcaatgcaacatcctccatcatggttaatacattggtttaacttatacacaaaattaaacaacatattaacacagtatcgatcaaatgaggtaaaaaaccatgggtttacattgatagataatcaaactcttagtggatttcaatttattttgaaccaatatggttgtatagtttatcataaggaactcaaaagaattactgtgacaacctataatcaattcttgacatggaaagatattagccttagtagattaaatgtttgtttaattacatggattagtaactgcttgaacacattaaataaaagcttaggcttaagatgcggattcaataatgttatcttgacacaactattcctttatggagattgtatactaaagctatttcacaatgaggggttctacataataaaagaggtagagggatttattatgtctctaattttaaatataacagaagaagatcaattcagaaaacgattttataatagtatgctcaacaacatcacagatgctgctaataaagctcagaaaaatctgctatcaagagtatgtcatacattattagataagacagtgtccgataatataataaatggcagatggataattctattaagtaagttccttaaattaattaagcttgcaggtgacaataaccttaacaatctgagtgaactatattttttgttcagaatatttggacacccaatggtagatgaaagacaagccatggatgctgttaaaattaattgcaatgagaccaaattttacttgttaagcagtctgagtatgttaagaggtgcctttatatatagaattataaaagggtttgtaaataattacaacagatggcctactttaagaaatgctattgttttacccttaagatggttaacttactataaactaaacacttatccttctttgttggaacttacagaaagagatttgattgtgttatcaggactacgtttctatcgtgagtttcggttgcctaaaaaagtggatcttgaaatgattataaatgataaagctatatcacctcctaaaaatttgatatggactagtttccctagaaattacatgccatcacacatacaaaactatatagaacatgaaaaattaaaattttccgagagtgataaatcaagaagagtattagagtattatttaagagataacaaattcaatgaatgtgatttatacaactgtgtagttaatcaaagttatctcaacaaccctaatcatgtggtatcattgacaggcaaagaaagagaactcagtgtaggtagaatgtttgcaatgcaaccgggaatgttcagacaggttcaaatattggcagagaaaatgatagctgaaaacattttacaattctttcctgaaagtcttacaagatatggtgatctagaactacaaaaaatattagaattgaaagcaggaataagtaacaaatcaaatcgctacaatgataattacaacaattacattagtaagtgctctatcatcacagatctcagcaaattcaatcaagcatttcgatatgaaacgtcatgtatttgtagtgatgtgctggatgaactgcatggtgtacaatctctattttcctggttacatttaactattcctcatgtcacaataatatgcacatataggcatgcacccccctatataggagatcatattgtagatcttaacaatgtagatgaacaaagtggattatatagatatcacatgggtggcatcgaagggtggtgtcaaaaactgtggaccatagaagctatatcactattggatctaatatctctcaaagggaaattctcaattactgctttaattaatggtgacaatcaatcaatagatataagcaaaccaatcagactcatggaaggtcaaactcatgctcaagcagattatttgctagcattaaatagccttaaattactgtataaagagtatgcaggcataggccacaaattaaaaggaactgagacttatatatcacgagatatgcaatttatgagtaaaacaattcaacataacggtgtatattacccagctagtataaagaaagtcctaagagtgggaccgtggataaacactatacttgatgatttcaaagtgagtctagaatctataggtagtttgacacaagaattagaatatagaggtgaaagtctattatgcagtttaatatttagaaatgtatggttatataatcagattgctctacaattaaaaaatcatgcattatgtaacaataaactatatttggacatattaaaggttctgaaacacttaaaaaccttttttaatcttgataatattgatacagcattaacattgtatatgaatttacccatgttatttggtggtggtgatcccaacttgttatatcgaagtttctatagaagaactcctgacttcctcacagaggctatagttcactctgtgttcatacttagttattatacaaaccatgacttaaaagataaacttcaagatctgtcagatgatagattgaataagttcttaacatgcataatcacgtttgacaaaaaccctaatgctgaattcgtaacattgatgagagatcctcaagctttagggtctgagagacaagctaaaattactagcgaaatcaatagactggcagttacagaggttttgagtacagctccaaacaaaatattctccaaaagtgcacaacattatactactacagagatagatctaaatgatattatgcaaaatatagaacctacatatcctcatgggctaagagttgtttatgaaagtttacccttttataaagcagagaaaatagtaaatcttatatcaggtacaaaatctataactaacatactggaaaaaacttctgccatagacttaacagatattgatagagccactgagatgatgaggaaaaacataactttgcttataaggatacttccattggattgtaacagagataaaagagagatattgagtatggaaaacctaagtattactgaattaagcaaatatgttagggaaagatcttggtctttatccaatatagttggtgttacatcacccagtatcatgtatacaatggacatcaaatatactacaagcactatatctagtggcataattatagagaaatataatgttaacagtttaacacgtggtgagagaggacccactaaaccatgggttggttcatctacacaagagaaaaaaacaatgccagtttataatagacaagtcttaaccaaaaaacagagagatcaaatagatctattagcaaaattggattgggtgtatgcatctatagataacaaggatgaattcatggaagaactcagcataggaacccttgggttaacatatgaaaaggccaagaaattatttccacaatatttaagtgtcaattatttgcatcgccttacagtcagtagtagaccatgtgaattccctgcatcaataccagcttatagaacaacaaattatcactttgacactagccctattaatcgcatattaacagaaaagtatggtgatgaagatattgacatagtattccaaaactgtataagctttggccttagtttaatgtcagtagtagaacaatttactaatgtatgtcctaacagaattattctcatacctaagcttaatgagatacatttgatgaaacctcccatattcacaggtgatgttgatattcacaagttaaaacaagtgatacaaaaacagcatatgtttttaccagacaaaataagtttgactcaatatgtggaattattcttaagtaataaaacactcaaatctggatctcatgttaattctaatttaatattggcacataaaatatctgactattttcataatacttacattttaagtactaatttagctggacattggattctgattatacaacttatgaaagattctaaaggtatttttgaaaaagattggggagagggatatataactgatcatatgtttattaatttgaaagttttcttcaatgcttataagacctatctcttgtgttttcataaaggttatggcaaagcaaagctggagtgtgatatgaacacttcagatcttctatgtgtattggaattaatagacagtagttattggaagtctatgtctaaggtatttttagaacaaaaagttatcaaatacattcttagccaagatgcaagtttacatagagtaaaaggatgtcatagcttcaaattatggtttcttaaacgtcttaatgtagcagaattcacagtttgcccttgggttgttaacatagattatcatccaacacatatgaaagcaatattaacttatatagatcttgttagaatgggattgataaatatagatagaatacacattaaaaataaacacaaattcaatgatgaattttatacttctaatctcttctacattaattataacttctcagataatactcatctattaactaaacatataaggattgctaattctgaattagaaaataattacaacaaattatatcatcctacaccagaaaccctagagaatatactagccaatccgattaaaagtaatgacaaaaagacactgaatgactattgtataggtaaaaatgttgactcaataatgttaccattgttatctaataagaagcttattaaatcgtctgcaatgattagaaccaattacagcaaacaagatttgtataatttattccctatggttgtgattgatagaattatagatcattcaggcaatacagccaaatccaaccaactttacactactacttcccaccaaatatctttagtgcacaatagcacatcactttactgcatgcttccttggcatcatattaatagattcaattttgtatttagttctacaggttgtaaaattagtatagagtatattttaaaagatcttaaaattaaagatcccaattgtatagcattcataggtgaaggagcagggaatttattattgcgtacagtagtggaacttcatcctgacataagatatatttacagaagtctgaaagattgcaatgatcatagtttacctattgagtttttaaggctgtacaatggacatatcaacattgattatggtgaaaatttgaccattcctgctacagatgcaaccaacaacattcattggtcttatttacatataaagtttgctgaacctatcagtctttttgtctgtgatgccgaattgtctgtaacagtcaactggagtaaaattataatagaatggagcaagcatgtaagaaagtgcaagtactgttcctcagttaataaatgtatgttaatagtaaaatatcatgctcaagatgatattgatttcaaattagacaatataactatattaaaaacttatgtatgcttaggcagtaagttaaagggatcggaggtttacttagtccttacaataggtcctgcgaatatattcccagtatttaatgtagtacaaaatgctaaattgatactatcaagaaccaaaaatttcatcatgcctaagaaagctgataaagagtctattgatgcaaatattaaaagtttgataccctttctttgttaccctataacaaaaaaaggaattaatactgcattgtcaaaactaaagagtgttgttagtggagatatactatcatattctatagctggacgtaatgaagttttcagcaataaacttataaatcataagcatatgaacatcttaaaatggttcaatcatgttttaaatttcagatcaacagaactaaactataaccatttatatatggtagaatctacatatccttacctaagtgaattgttaaacagcttgacaaccaatgaacttaaaaaactgattaaaatcacaggtagtctgttatacaactttcataatgaataatgaataaagatcttataataaaaattcccatagctatacactaacactgtattcaattatagttattaaaaattaaaaatcgtacgattttttaaataacttttagtgaactaatcctaaagttatcattttaatcttggaggaataaatttaaaccctaatctaattggtttatatgtgtattaactaaattacgagatattagtttttgacactttttttctcgtgggtcggcatggcatctccacctcctcgcggtccgacctgggcatccgaaggaggacgcacgtccactcggatggctaagggagctgctaacaaagcccgaaaggaagctgagttggctgctgccaccgctgagcaataactagcataaccccttggggcctctaaacgggtcttgaggggttttttgctgaaaggaggaactatatacgcgtaagcttctcgacccattctcatgtttgacagcttatcatcgaatttctgccattcatccgcttattatcacttattcaggcgtagcaaccaggcgtttaagggcaccaataactgccttaaaaaaattacgccccgccctgccactcatcgcagtactgttgtaattcattaagcattctgccgacatggaagccatcacagacggcatgatgaacctgaatcgccagcggcatcagcaccttgtcgccttgcgtataatatttgcccatggtgaaaacgggggcgaagaagttgtccatattggccacgtttaaatcaaaactggtgaaactcacccagggattggctgagacgaaaaacatattctcaataaaccctttagggaaataggccaggttttcaccgtaacacgccacatcttgcgaatatatgtgtagaaactgccggaaatcgtcgtggtattcactccagagcgatgaaaacgtttcagtttgctcatggaaaacggtgtaacaagggtgaacactatcccatatcaccagctcaccgtctttcattgccatacggaattccggatgagcattcatcaggcgggcaagaatgtgaataaaggccggataaaacttgtgcttatttttctttacggtctttaaaaaggccgtaatatccagctgaacggtctggttataggtacattgagcaactgactgaaatgcctcaaaatgttctttacgatgccattgggatatatcaacggtggtatatccagtgatttttttctccattttagcttccttagctcctgaaaatctcgataactcaaaaaatacgcccggtagtgatcttatttcattatggtgaaagttggaacctcttacgtgccgatcaacgtctcattttcgccaaaagttggcccagggcttcccggtatcaacagggacaccaggatttatttattctgcgaagtgatcttccgtcacaggtatttattcgcgataagctcatggagcggcgtaaccgtcgcacaggaaggacagagaaagcgcggatctgggaagtgacggacagaacggtcaggacctggattggggaggcggttgccgccgctgctgctgacggtgtgacgttctctgttccggtcacaccacatacgttccgccattcctatgcgatgcacatgctgtatgccggtataccgctgaaagttctgcaaagcctgatgggacataagtccatcagttcaacggaagtctacacgaaggtttttgcgctggatgtggctgcccggcaccgggtgcagtttgcgatgccggagtctgatgcggttgcgatgctgaaacaattatcctgagaataaatgccttggcctttatatggaaatgtggaactgagtggatatgctgtttttgtctgttaaacagagaagctggctgttatccactgagaagcgaacgaaacagtcgggaaaatctcccattatcgtagagatccgcattattaatctcaggagcctgtgtagcgtttataggaagtagtgttctgtcatgatgcctgcaagcggtaacgaaaacgatttgaatatgccttcaggaacaatagaaatcttcgtgcggtgttacgttgaagtggagcggattatgtcagcaatggacagaacaacctaatgaacacagaaccatgatgtggtctgtccttttacagccagtaggctcgccgcagtcgagcgacggcgaagccctcgagtgagcgaggaagcaccagggaacagcacttatatattctgcttacacacgatgcctgaaaaaacttcccttggggttatccacttatccacggggatatttttataattattttttttatagtttttagatcttcttttttagagcgccttgtaggcctttatccatgctggttctagagaaggtgttgtgacaaattgccctttcagtgtgacaaatcaccctcaaatgacagtcctgtctgtgacaaattgcccttaaccctgtgacaaattgccctcagaagaagctgttttttcacaaagttatccctgcttattgactcttttttatttagtgtgacaatctaaaaacttgtcacacttcacatggatctgtcatggcggaaacagcggttatcaatcacaagaaacgtaaaaatagcccgcgaatcgtccagtcaaacgacctcactgaggcggcatatagtctctcccgggatcaaaaacgtatgctgtatctgttcgttgaccagatcagaaaatctgatggcaccctacaggaacatgacggtatctgcgagatccatgttgctaaatatgctgaaatattcggattgacctctgcggaagccagtaaggatatacggcaggcattgaagagtttcgcggggaaggaagtggttttttatcgccctgaagaggatgccggcgatgaaaaaggctatgaatcttttccttggtttatcaaacgtgcgcacagtccatccagagggctttacagtgtacatatcaacccatatctcattcccttctttatcgggttacagaaccggtttacgcagtttcggcttagtgaaacaaaagaaatcaccaatccgtatgccatgcgtttatacgaatccctgtgtcagtatcgtaagccggatggctcaggcatcgtctctctgaaaatcgactggatcatagagcgttaccagctgcctcaaagttaccagcgtatgcctgacttccgccgccgcttcctgcaggtctgtgttaatgagatcaacagcagaactccaatgcgcctctcatacattgagaaaaagaaaggccgccagacgactcatatcgtattttccttccgcgatatcacttccatgacgacaggatagtctgagggttatctgtcacagatttgagggtggttcgtcacatttgttctgacctactgagggtaatttgtcacagttttgctgtttccttcagcctgcatggattttctcatactttttgaactgtaatttttaaggaagccaaatttgagggcagtttgtcacagttgatttccttctctttcccttcgtcatgtgacctgatatcgggggttagttcgtcatcattgatgagggttgattatcacagtttattactctgaattggctatccgcgtgtgtacctctacctggagtttttcccacggtggatatttcttcttgcgctgagcgtaagagctatctgacagaacagttcttctttgcttcctcgccagttcgctcgctatgctcggttacacggctgcggcgagcgctagtgataataagtgactgaggtatgtgctcttcttatctccttttgtagtgttgctcttattttaaacaactttgcggttttttgatgactttgcgattttgttgttgctttgcagtaaattgcaagatttaataaaaaaacgcaaagcaatgattaaaggatgttcagaatgaaactcatggaaacacttaaccagtgcataaacgctggtcatgaaatgacgaaggctatcgccattgcacagtttaatgatgacagcccggaagcgaggaaaataacccggcgctggagaataggtgaagcagcggatttagttggggtttcttctcaggctatcagagatgccgagaaagcagggcgactaccgcacccggatatggaaattcgaggacgggttgagcaacgtgttggttatacaattgaacaaattaatcatatgcgtgatgtgtttggtacgcgattgcgacgtgctgaagacgtatttccaccggtgatcggggttgctgcccataaaggtggcgtttacaaaacctcagtttctgttcatcttgctcaggatctggctctgaaggggctacgtgttttgctcgtggaaggtaacgacccccagggaacagcctcaatgtatcacggatgggtaccagatcttcatattcatgcagaagacactctcctgcctttctatcttggggaaaaggacgatgtcacttatgcaataaagcccacttgctggccggggcttgacattattccttcctgtctggctctgcaccgtattgaaactgagttaatgggcaaatttgatgaaggtaaactgcccaccgatccacacctgatgctccgactggccattgaaactgttgctcatgactatgatgtcatagttattgacagcgcgcctaacctgggtatcggcacgattaatgtcgtatgtgctgctgatgtgctgattgttcccacgcctgctgagttgtttgactacacctccgcactgcagtttttcgatatgcttcgtgatctgctcaagaacgttgatcttaaagggttcgagcctgatgtacgtattttgcttaccaaatacagcaatagtaatggctctcagtccccgtggatggaggagcaaattcgggatgcctggggaagcatggttctaaaaaatgttgtacgtgaaacggatgaagttggtaaaggtcagatccggatgagaactgtttttgaacaggccattgatcaacgctcttcaactggtgcctggagaaatgctctttctatttgggaacctgtctgcaatgaaattttcgatcgtctgattaaaccacgctgggagattagataatgaagcgtgcgcctgttattccaaaacatacgctcaatactcaaccggttgaagatacttcgttatcgacaccagctgccccgatggtggattcgttaattgcgcgcgtaggagtaatggctcgcggtaatgccattactttgcctgtatgtggtcgggatgtgaagtttactcttgaagtgctccggggtgatagtgttgagaagacctctcgggtatggtcaggtaatgaacgtgaccaggagctgcttactgaggacgcactggatgatctcatcccttcttttctactgactggtcaacagacaccggcgttcggtcgaagagtatctggtgtcatagaaattgccgatgggagtcgccgtcgtaaagctgctgcacttaccgaaagtgattatcgtgttctggttggcgagctggatgatgagcagatggctgcattatccagattgggtaacgattatcgcccaacaagtgcttatgaacgtggtcagcgttatgcaagccgattgcagaatgaatttgctggaaatatttctgcgctggctgatgcggaaaatatttcacgtaagattattacccgctgtatcaacaccgccaaattgcctaaatcagttgttgctcttttttctcaccccggtgaactatctgcccggtcaggtgatgcacttcaaaaagcctttacagataaagaggaattacttaagcagcaggcatctaaccttcatgagcagaaaaaagctggggtgatatttgaagctgaagaagttatcactcttttaacttctgtgcttaaaacgtcatctgcatcaagaactagtttaagctcacgacatcagtttgctcctggagcgacagtattgtataagggcgataaaatggtgcttaacctggacaggtctcgtgttccaactgagtgtatagagaaaattgaggccattcttaaggaacttgaaaagccagcaccctgatgcgaccacgttttagtctacgtttatctgtctttacttaatgtcctttgttacaggccagaaagcataactggcctgaatattctctctgggcccactgttccacttgtatcgtcggtctgataatcagactgggaccacggtcccactcgtatcgtcggtctgattattagtctgggaccacggtcccactcgtatcgtcggtctgattattagtctgggaccacggtcccactcgtatcgtcggtctgataatcagactgggaccacggtcccactcgtatcgtcggtctgattattagtctgggaccatggtcccactcgtatcgtcggtctgattattagtctgggaccacggtcccactcgtatcgtcggtctgattattagtctggaaccacggtcccactcgtatcgtcggtctgattattagtctgggaccacggtcccactcgtatcgtcggtctgattattagtctgggaccacgatcccactcgtgttgtcggtctgattatcggtctgggaccacggtcccacttgtattgtcgatcagactatcagcgtgagactacgattccatcaatgcctgtcaagggcaagtattgacatgtcgtcgtaacctgtagaacggagtaacctcggtgtgcggttgtatgcctgctgtggattgctgctgtgtcctgcttatccacaacattttgcgcacggttatgtggacaaaatacctggttacccaggccgtgccggcacgttaaccgggctgcatccgatgcaagtgtgtcgctgtcgagttt

SEQ ID NO: 74 - protein, 1290 aa, Artificial Sequence
  Description of Artificial Sequence: Synthetic polypeptide
MFVFLVLLPLVSIQCVNLTTRTQLPPAYTNSFTRGVYYPDKVFRSSVLHSTQDLFLPFFSNVTWFHAIHVSGTNGTKRFDNPVLPFNDGVYFASTEKSNIIRGWIFGTTLDSKTQSLLIVNNATNVVIKVCEFQFCNDPFLGVYYHKNNKSCMESEFRVYSSANNCTFEYVSQPFLMDLEGKQGNFKNLREFVFKNIDGYFKIYSKHTPINLVRDLPQGFSALEPLVDLPIGINITRFQTLLALHRSYLTPGDSSSGWTAGAAAYYVGYLQPRTFLLKYNENGTITDAVDCALDPLSETKCTLKSFTVEKGIYQTSNFRVQPTESIVRFPNITNLCPFGEVFNATRFASVYAWNRKRISNCVADYSVLYNSASFSTFKCYGVSPTKLNDLCFTNVYADSFVIRGDEVRQIAPGQTGKIADYNYKLPDDFTGCVIAWNSNNLDSKVGGNYNYRYRLFRKSNLKPFERDISTEIYQAGSTPCNGVEGFNCYFPLQSYGFQPTNGVGYQPYRVVVLSFELLHAPATVCGPKKSTNLVKNKCVNFNFNGLTGTGVLTESNKKFLPFQQFGRDIADTTDAVRDPQTLEILDITPCSFGGVSVITPGTNTSNQVAVLYQGVNCTEVPVAIHADQLTPTWRVYSTGSNVFQTRAGCLIGAEHVNNSYECDIPIGAGICASYQTQTNSPRRARSVASQSIIAYTMSLGAENSVAYSNNSIAIPTNFTISVTTEILPVSMTKTSVDCTMYICGDSTECSNLLLQYGSFCTQLNRALTGIAVEQDKNTQEVFAQVKQIYKTPPIKDFGGFNFSQILPDPSKPSKRSFIEDLLFNKVTLADAGFIKQYGDCLGDIAARDLICAQKFNGLTVLPPLLTDEMIAQYTSALLAGTITSGWTFGAGAALQIPFAMQMAYRFNGIGVTQNVLYENQKLIANQFNSAIGKIQDSLSSTASALGKLQDVVNQNAQALNTLVKQLSSNFGAISSVLNDILSRLDKVEAEVQIDRLITGRLQSLQTYVTQQLIRAAEIRASANLAATKMSECVLGQSKRVDFCGKGYHLMSFPQSAPHGVVFLHVTYVPAQEKNFTTAPAICHDGKAHFPREGVFVSNGTHWFVTQRNFYEPQIITTDNTFVSGNCDVVIGIVNNTVYDPLQPELDSFKEELDKYFKNHTSPDVDLGDISGINASVVNIQKEIDRLNEVAKNLNESLIDLQELGKYEQYIKWPWYIWLGFIAGLIAIVMVTIMLCCMTSCCSCLKGCCSCGSCCKFDEDDGLLLYCKARSTPITLSKDQLSGINNIAFSN

SEQ ID NO: 75 - DNA, 3873 bp, Artificial Sequence
  Description of Artificial Sequence: Synthetic polynucleotide
atgtttgtttttcttgttttattgccactagtctctattcagtgtgttaatcttacaaccagaactcaattaccccctgcatacactaattctttcacacgtggtgtttattaccctgacaaagttttcagatcctcagttttacattcaactcaggacttgttcttacctttcttttccaatgttacttggttccatgctatacatgtctctgggaccaatggtactaagaggtttgataaccctgtcctaccatttaatgatggtgtttattttgcttccactgagaagtctaacataataagaggctggatttttggtactactttagattcgaagacccagtccctacttattgttaataacgctactaatgttgttattaaagtctgtgaatttcaattttgtaatgatccatttttgggtgtttattaccacaaaaacaacaaaagttgtatggaaagtgagttcagagtttattctagtgcgaataattgcacttttgaatatgtctctcagccttttcttatggaccttgaaggaaaacagggtaatttcaaaaatcttagggaatttgtgtttaagaatattgatggttattttaaaatatattctaagcacacgcctattaatttagtgcgtgatctccctcagggtttttcggctttagaaccattggtagatttgccaataggtattaacatcactaggtttcaaactttacttgctttacatagaagttatttgactcctggtgattcttcttcaggttggacagctggtgctgcagcttattatgtgggttatcttcaacctaggacttttctattaaaatataatgaaaatggaaccattacagatgctgtagactgtgcacttgaccctctctcagaaacaaagtgtacgttgaaatccttcactgtagaaaaaggaatctatcaaacttctaactttagagtccaaccaacagaatctattgttagatttcctaatattacaaacttgtgcccttttggtgaagtttttaacgccaccagatttgcatctgtttatgcttggaacaggaagagaatcagcaactgtgttgctgattattctgtcctatataattccgcatcattttccacttttaagtgttatggagtgtctcctactaaattaaatgatctctgctttactaatgtctatgcagattcatttgtaattagaggtgatgaagtcagacaaatcgctccagggcaaactggaaagattgctgattataattataaattaccagatgattttacaggctgcgttatagcttggaattctaacaatcttgattctaaggttggtggtaattataattaccggtatagattgtttaggaagtctaatctcaaaccttttgagagagatatttcaactgaaatctatcaggccggtagcacaccttgtaatggtgttgaaggttttaattgttactttcctttacaatcatatggtttccaacccactaatggtgttggttaccaaccatacagagtagtagtactttcttttgaacttctacatgcaccagcaactgtttgtggacctaaaaagtctactaatttggttaaaaacaaatgtgtcaatttcaacttcaatggtttaacaggcacaggtgttcttactgagtctaacaaaaagtttctgcctttccaacaatttggcagagacattgctgacactactgatgctgtccgtgatccacagacacttgagattcttgacattacaccatgttcttttggtggtgtcagtgttataacaccaggaacaaatacttctaaccaggttgctgttctttatcagggtgttaactgcacagaagtccctgttgctattcatgcagatcaacttactcctacttggcgtgtttattctacaggttctaatgtttttcaaacacgtgcaggctgtttaataggggctgaacatgtcaacaactcatatgagtgtgacatacccattggtgcaggtatatgcgctagttatcagactcagactaattctcctcggcgggcacgtagtgtagctagtcaatccatcattgcctacactatgtcacttggtgcagaaaattcagttgcttactctaataactctattgccatacccacaaattttactattagtgttaccacagaaattctaccagtgtctatgaccaagacatcagtagattgtacaatgtacatttgtggtgattcaactgaatgcagcaatcttttgttgcaatatggcagtttttgtacacaattaaaccgtgctttaactggaatagctgttgaacaagacaaaaacacccaagaagtttttgcacaagtcaaacaaatttacaaaacaccaccaattaaagattttggtggttttaatttttcacaaatattaccagatccatcaaaaccaagcaagaggtcatttattgaagatctacttttcaacaaagtgacacttgcagatgctggcttcatcaaacaatatggtgattgccttggtgatattgctgctagagacctcatttgtgcacaaaagtttaacggccttactgttttgccacctttgctcacagatgaaatgattgctcaatacacttctgcactgttagcgggtacaatcacttctggttggacctttggtgcaggtgctgcattacaaataccatttgctatgcaaatggcttataggtttaatggtattggagttacacagaatgttctctatgagaaccaaaaattgattgccaaccaatttaatagtgctattggcaaaattcaagactcactttcttccacagcaagtgcacttggaaaacttcaagatgtggtcaaccaaaatgcacaagctttaaacacgcttgttaaacaacttagctccaattttggtgcaatttcaagtgttttaaatgatatcctttcacgtcttgacaaagttgaggctgaagtgcaaattgataggttgatcacaggcagacttcaaagtttgcagacatatgtgactcaacaattaattagagctgcagaaatcagagcttctgctaatcttgctgctactaaaatgtcagagtgtgtacttggacaatcaaaaagagttgatttttgtggaaagggctatcatcttatgtccttccctcagtcagcacctcatggtgtagtcttcttgcatgtgacttatgtccctgcacaagaaaagaacttcacaactgctcctgccatttgtcatgatggaaaagcacactttcctcgtgaaggtgtctttgtttcaaatggcacacactggtttgtaacacaaaggaatttttatgaaccacaaatcattactacagacaacacatttgtgtctggtaactgtgatgttgtaataggaattgtcaacaacacagtttatgatcctttgcaacctgaattagactcattcaaggaggagttagataaatattttaagaatcatacatcaccagatgttgatttaggtgacatctctggcattaatgcttcagttgtaaacattcaaaaagaaattgaccgcctcaatgaggttgccaagaatttaaatgaatctctcatcgatctccaagaacttggaaagtatgagcagtatataaaatggccatggtacatttggctaggttttatagctggcttgattgccatagtaatggtgacaattatgctttgctgtatgaccagttgctgtagttgtctcaagggctgttgttcttgtggatcctgctgcaaatttgatgaagacgacggactgctcctatactgtaaggccagaagcacaccaatcacactaagcaaggatcaactgagtggtataaataatattgcatttagtaactaa

SEQ ID NO: 76 - DNA, 16749 bp, Artificial Sequence
  Description of Artificial Sequence: Synthetic polynucleotide
acgcgaaaaaatgcgtacaacaaacttgcataaaccaaaaaaatggggcaaataagaatttgataagtaccacttaaatttaactcccttgcttagcgatggtgagcgagctgattaaggagaacatgcacatgaagctgtacatggagggcaccgtgaacaaccaccacttcaagtgcacatccgagggcgaaggcaagccctacgagggcacccagaccatgagaatcaaggcggtcgagggcggccctctccccttcgccttcgacatcctggctaccagcttcatgtacggcagcaaaaccttcatcaaccacacccagggcatccccgacttctttaagcagtccttccccgagggcttcacatgggagagagtcaccacatacgaagacgggggcgtgctgaccgctacccaggacaccagcctccaggacggctgcctcatctacaacgtcaagatcagaggggtgaacttcccatccaacggccctgtgatgcagaagaaaacactcggctgggaggcctccaccgagaccctgtaccccgctgacggcggcctggaaggcagagccgacatggccctgaagctcgtgggcgggggccacctgatctgcaacttgaagaccacatacagatccaagaaacccgctaagaacctcaagatgcccggcgtctactatgtggacagaagactggaaagaatcaaggaggccgacaaagagacctacgtcgagcagcacgaggtggctgtggccagatactgcgacctccctagcaaactggggcacagatgagtattcaattatagttattaaaaacttaacagaagacaaaaatggggcaaataagaatttgataagtaccacttaaatttaactcccttgcttagcgatgggttcgaattcgctatcgatgataaaagtacgtctacaaaatctatttgataatgatgaagtagcgctactaaaaataacgtgttatacggataaactaatacatctaacgaatgcgctagcgaaagcggtaatacatacgataaaactaaatggtatagtatttgtacatgtaataacgtcgtcggatatatgtccgaataataatatagtagtaaaatcgaattttacgacgatgccggtactacaaaatggtggttatatatgggaaatgatggaactaacgcattgttcgcaaccgaatggtctactagatgataattgtgaaataaaattttcgaaaaaactatcggattcgacgatgacgaattatatgaatcaactatcggaactactaggttttgatctaaatccgtaaattataattaatatcaactagcaaatcaatgtcactaacaccattagttaatataaaacttaacagaagacaaaaatggggcaaataaatcaattcagccaacccaaccatggatacgacgcataatgataatacgccgcaacgtctaatgataacggatatgcgtccgctatcgctagaaacgataataacgtcgctaacgcgtgatataataacgcataaatttatatatctaataaatcatgaatgtatagtacgtaaactagatgaacgtcaagcgacgtttacgtttctagtaaattatgaaatgaaactactacataaagtaggttcgacgaaatataaaaaatatacggaatataatacgaaatatggtacgtttccgatgccgatatttataaatcatgatggttttctagaatgtataggtataaaaccgacgaaacatacgccgataatatataaatatgatctaaatccgtaaatttcaacacaatattcacacaatctaaaacaacaactctatgcataactatactccatagtccagatggagcctgaaaattatagtaatttaaaattaaggagagatataagatagaagatggggcaaatacaaagatggctcttagcaaagtcaagttgaatgatacactcaacaaagatcaacttctgtcatccagcaaatacaccatccaacggagcacaggagatagtattgatactcctaattatgatgtgcagaaacacatcaataagttatgtggcatgttattaatcacagaagatgctaatcataaattcactgggttaataggtatgttatatgcgatgtctaggttaggaagagaagacaccataaaaatactcagagatgcgggatatcatgtaaaagcaaatggagtagatgtaacaacacatcgtcaagacattaatggaaaagaaatgaaatttgaagtgttaacattggcaagcttaacaactgaaattcaaatcaacattgagatagaatctagaaaatcctacaaaaaaatgctaaaagaaatgggagaggtagctccagaatacaggcatgactctcctgattgtgggatgataatattatgtatagcagcattagtaataactaaattagcagcaggggacagatctggtcttacagccgtgattaggagagctaataatgtcctaaaaaatgaaatgaaacgttacaaaggcttactacccaaggacatagccaacagcttctatgaagtgtttgaaaaacatccccactttatagatgtttttgttcattttggtatagcacaatcttctaccagaggtggcagtagagttgaagggatttttgcaggattgtttatgaatgcctatggtgcagggcaagtgatgttacggtggggagtcttagcaaaatcagttaaaaatattatgttaggacatgctagtgtgcaagcagaaatggaacaagttgttgaggtttatgaatatgcccaaaaattgggtggtgaagcaggattctaccatatattgaacaacccaaaagcatcattattatctttgactcaatttcctcacttctccagtgtagtattaggcaatgctgctggcctaggcataatgggagagtacagaggtacaccgaggaatcaagatctatatgatgcagcaaaggcatatgctgaacaactcaaagaaaatggtgtgattaactacagtgtactagacttgacagcagaagaactagaggctatcaaacatcagcttaatccaaaagataatgatgtagagctttgagttaataaaaaatggggcaaataaatcatcatggaaaagtttgctcctgaattccatggagaagatgcaaacaacagggctactaaattcctagaatcaataaagggcaaattcacatcacccaaagatcccaagaaaaaagatagtatcatatctgtcaactcaatagatatagaagtaaccaaagaaagccctataacatcaaattcaactattatcaacccaacaaatgagacagatgatactgcagggaacaagcccaattatcaaagaaaacctctagtaagtttcaaagaagaccctacaccaagtgataatcccttttctaaactatacaaagaaaccatagaaacatttgataacaatgaagaagaatccagctattcatacgaagaaataaatgatcagacaaacgataatataacagcaagattagataggattgatgaaaaattaagtgaaatactaggaatgcttcacacattagtagtggcaagtgcaggacctacatctgctcgggatggtataagagatgccatgattggtttaagagaagaaatgatagaaaaaatcagaactgaagcattaatgaccaatgacagattagaagctatggcaagactcaggaatgaggaaagtgaaaagatggcaaaagacacatcagatgaagtgtctctcaatccaacatcagagaaattgaacaacctattggaagggaatgatagtgacaatgatctatcacttgaagatttctgattagttaccactcttcacatcaacacacaataccaacagaagaccaacaaactaaccaacccaatcatccaaccaaacatccatccgccaatcagccaaacagccaacaaaacaaccagccaatccaaaactaaccacccggaaaaaatctataatatagttacaaaaaaaggaaagggtggggcaaatatggaaacatacgtgaacaagcttcacgaaggctccacatacacagctgctgttcaatacaatgtcttagaaaaagacgatgaccctgcatcacttacaatatgggtgcccatgttccaatcatctatgccagcagatttacttataaaagaactagctaatgtcaacatactagtgaaacaaatatccacacccaagggaccttcactaagagtcatgataaactcaagaagtgcagtgctagcacaaatgcccagcaaatttaccatatgcgctaatgtgtccttggatgaaagaagcaaactagcatatgatgtaaccacaccctgtgaaatcaaggcatgtagtctaacatgcctaaaatcaaaaaatatgttgactacagttaaagatctcactatgaagacactcaaccctacacatgatattattgctttatgtgaatttgaaaacatagtaacatcaaaaaaagtcataataccaacatacctaagatccatcagtgtcagaaataaagatctgaacacacttgaaaatataacaaccactgaattcaaaaatgctatcacaaatgcaaaaatcatcccttactcaggattactattagtcatcacagtgactgacaacaaaggagcattcaaatacataaagccacaaagtcaattcatagtagatcttggagcttacctagaaaaagaaagtatatattatgttaccacaaattggaagcacacagctacacgatttgcaatcaaacccatggaagattaacctttttcctctacatcagtgtgttaattcatacaaactttctacctacattcttcacttcaccatcacaatcacaaacactctgtggttcaaccaatcaaacaaaacttatctgaagtcccagatcatcccaagtcattgtttatcagatctagtactcaaataagttaataaaaaatatacacatggacgtccatggggcaaatgcaaacatgtttgtttttcttgttttattgccactagtctctattcagtgtgttaatcttacaaccagaactcaattaccccctgcatacactaattctttcacacgtggtgtttattaccctgacaaagttttcagatcctcagttttacattcaactcaggacttgttcttacctttcttttccaatgttacttggttccatgctatacatgtctctgggaccaatggtactaagaggtttgataaccctgtcctaccatttaatgatggtgtttattttgcttccactgagaagtctaacataataagaggctggatttttggtactactttagattcgaagacccagtccctacttattgttaataacgctactaatgttgttattaaagtctgtgaatttcaattttgtaatgatccatttttgggtgtttattaccacaaaaacaacaaaagttgtatggaaagtgagttcagagtttattctagtgcgaataattgcacttttgaatatgtctctcagccttttcttatggaccttgaaggaaaacagggtaatttcaaaaatcttagggaatttgtgtttaagaatattgatggttattttaaaatatattctaagcacacgcctattaatttagtgcgtgatctccctcagggtttttcggctttagaaccattggtagatttgccaataggtattaacatcactaggtttcaaactttacttgctttacatagaagttatttgactcctggtgattcttcttcaggttggacagctggtgctgcagcttattatgtgggttatcttcaacctaggacttttctattaaaatataatgaaaatggaaccattacagatgctgtagactgtgcacttgaccctctctcagaaacaaagtgtacgttgaaatccttcactgtagaaaaaggaatctatcaaacttctaactttagagtccaaccaacagaatctattgttagatttcctaatattacaaacttgtgcccttttggtgaagtttttaacgccaccagatttgcatctgtttatgcttggaacaggaagagaatcagcaactgtgttgctgattattctgtcctatataattccgcatcattttccacttttaagtgttatggagtgtctcctactaaattaaatgatctctgctttactaatgtctatgcagattcatttgtaattagaggtgatgaagtcagacaaatcgctccagggcaaactggaaagattgctgattataattataaattaccagatgattttacaggctgcgttatagcttggaattctaacaatcttgattctaaggttggtggtaattataattaccggtatagattgtttaggaagtctaatctcaaaccttttgagagagatatttcaactgaaatctatcaggccggtagcacaccttgtaatggtgttgaaggttttaattgttactttcctttacaatcatatggtttccaacccactaatggtgttggttaccaaccatacagagtagtagtactttcttttgaacttctacatgcaccagcaactgtttgtggacctaaaaagtctactaatttggttaaaaacaaatgtgtcaatttcaacttcaatggtttaacaggcacaggtgttcttactgagtctaacaaaaagtttctgcctttccaacaatttggcagagacattgctgacactactgatgctgtccgtgatccacagacacttgagattcttgacattacaccatgttcttttggtggtgtcagtgttataacaccaggaacaaatacttctaaccaggttgctgttctttatcagggtgttaactgcacagaagtccctgttgctattcatgcagatcaacttactcctacttggcgtgtttattctacaggttctaatgtttttcaaacacgtgcaggctgtttaataggggctgaacatgtcaacaactcatatgagtgtgacatacccattggtgcaggtatatgcgctagttatcagactcagactaattctcctcggcgggcacgtagtgtagctagtcaatccatcattgcctacactatgtcacttggtgcagaaaattcagttgcttactctaataactctattgccatacccacaaattttactattagtgttaccacagaaattctaccagtgtctatgaccaagacatcagtagattgtacaatgtacatttgtggtgattcaactgaatgcagcaatcttttgttgcaatatggcagtttttgtacacaattaaaccgtgctttaactggaatagctgttgaacaagacaaaaacacccaagaagtttttgcacaagtcaaacaaatttacaaaacaccaccaattaaagattttggtggttttaatttttcacaaatattaccagatccatcaaaaccaagcaagaggtcatttattgaagatctacttttcaacaaagtgacacttgcagatgctggcttcatcaaacaatatggtgattgccttggtgatattgctgctagagacctcatttgtgcacaaaagtttaacggccttactgttttgccacctttgctcacagatgaaatgattgctcaatacacttctgcactgttagcgggtacaatcacttctggttggacctttggtgcaggtgctgcattacaaataccatttgctatgcaaatggcttataggtttaatggtattggagttacacagaatgttctctatgagaaccaaaaattgattgccaaccaatttaatagtgctattggcaaaattcaagactcactttcttccacagcaagtgcacttggaaaacttcaagatgtggtcaaccaaaatgcacaagctttaaacacgcttgttaaacaacttagctccaattttggtgcaatttcaagtgttttaaatgatatcctttcacgtcttgacaaagttgaggctgaagtgcaaattgataggttgatcacaggcagacttcaaagtttgcagacatatgtgactcaacaattaattagagctgcagaaatcagagcttctgctaatcttgctgctactaaaatgtcagagtgtgtacttggacaatcaaaaagagttgatttttgtggaaagggctatcatcttatgtccttccctcagtcagcacctcatggtgtagtcttcttgcatgtgacttatgtccctgcacaagaaaagaacttcacaactgctcctgccatttgtcatgatggaaaagcacactttcctcgtgaaggtgtctttgtttcaaatggcacacactggtttgtaacacaaaggaatttttatgaaccacaaatcattactacagacaacacatttgtgtctggtaactgtgatgttgtaataggaattgtcaacaacacagtttatgatcctttgcaacctgaattagactcattcaaggaggagttagataaatattttaagaatcatacatcaccagatgttgatttaggtgacatctctggcattaatgcttcagttgtaaacattcaaaaagaaattgaccgcctcaatgaggttgccaagaatttaaatgaatctctcatcgatctccaagaacttggaaagtatgagcagtatataaaatggccatggtacatttggctaggttttatagctggcttgattgccatagtaatggtgacaattatgctttgctgtatgaccagttgctgtagttgtctcaagggctgttgttcttgtggatcctgctgcaaatttgatgaagacgacggactgctcctatactgtaaggccagaagcacaccaatcacactaagcaaggatcaactgagtggtataaataatattgcatttagtaactaaataaaaatagcacctaatcatgttcttacaatggtttactatctgctcatagacaacccatctatcattggattttcttaaaatctgaacttcatcgaaactcttatctataaaccatctcacttacactatttaagtagattcctagtttatagttatataaaacacaattgaatgccagtcgaccttaccatctgtaaaaatgaaaactggggcaaatatgtcacgaaggaatccttgcaaatttgaaattcgaggtcattgcttaaatggtaagaggtgtcattttagtcataattattttgaatggccaccccatgcactgcttgtaagacaaaactttatgttaaacagaatacttaagtctatggataaaagtatagataccttatcagaaataagtggagctgcagagttggacagaacagaagagtatgctcttggtgtagttggagtgctagagagttatataggatcaataaacaatataactaaacaatcagcatgtgttgccatgagcaaactcctcactgaactcaatagtgatgatatcaaaaagctgagggacaatgaagagctaaattcacccaagataagagtgtacaatactgtcatatcatatattgaaagcaacaggaaaaacaataaacaaactatccatctgttaaaaagattgccagcagacgtattgaagaaaaccatcaaaaacacattggatatccataagagcataaccatcaacaacccaaaagaatcaactgttagtgatacaaatgaccatgccaaaaataatgatactacctgacaaatatccttgtagtataacttccatactaataacaagtagatgtagagttactatgtataatcaaaagaacacactatatttcaatcaaaacaacccaaataaccatatgtactcaccgaatcaaacattcaatgaaatccattggacctctcaagaattgattgacacaattcaaaattttctacaacatctaggtattattgaggatatatatacaatatatatattagtgtcataacactcaattctaacactcaccacatcgttacattattaattcaaacaattcaagttgtgggacaaaatggatcccattattaatggaaattctgctaatgtttatctaaccgatagttatttaaaaggtgttatctctttctcagagtgtaatgctttaggaagttacatattcaatggtccttatctcaaaaatgattataccaacttaattagtagacaaaatccattaatagaacacatgaatctaaagaaactaaatataacacagtccttaatatctaagtatcataaaggtgaaataaaattagaagaacctacttattttcagtcattacttatgacatacaagagtatgacctcgtcagaacagattgctaccactaatttacttaaaaagataataagaagagctatagaaataagtgatgtcaaagtctatgctatattgaataaactagggcttaaagaaaaggacaagattaaatccaacaatggacaagatgaagacaactcagttattacgaccataatcaaagatgatatactttcagctgttaaagataatcaatctcatcttaaagcagacaaaaatcactctacaaaacaaaaagacacaatcaaaacaacactcttgaagaaattgatgtgttcaatgcaacatcctccatcatggttaatacattggtttaacttatacacaaaattaaacaacatattaacacagtatcgatcaaatgaggtaaaaaaccatgggtttacattgatagataatcaaactcttagtggatttcaatttattttgaaccaatatggttgtatagtttatcataaggaactcaaaagaattactgtgacaacctataatcaattcttgacatggaaagatattagccttagtagattaaatgtttgtttaattacatggattagtaactgcttgaacacattaaataaaagcttaggcttaagatgcggattcaataatgttatcttgacacaactattcctttatggagattgtatactaaagctatttcacaatgaggggttctacataataaaagaggtagagggatttattatgtctctaattttaaatataacagaagaagatcaattcagaaaacgattttataatagtatgctcaacaacatcacagatgctgctaataaagctcagaaaaatctgctatcaagagtatgtcatacattattagataagacagtgtccgataatataataaatggcagatggataattctattaagtaagttccttaaattaattaagcttgcaggtgacaataaccttaacaatctgagtgaactatattttttgttcagaatatttggacacccaatggtagatgaaagacaagccatggatgctgttaaaattaattgcaatgagaccaaattttacttgttaagcagtctgagtatgttaagaggtgcctttatatatagaattataaaagggtttgtaaataattacaacagatggcctactttaagaaatgctattgttttacccttaagatggttaacttactataaactaaacacttatccttctttgttggaacttacagaaagagatttgattgtgttatcaggactacgtttctatcgtgagtttcggttgcctaaaaaagtggatcttgaaatgattataaatgataaagctatatcacctcctaaaaatttgatatggactagtttccctagaaattacatgccatcacacatacaaaactatatagaacatgaaaaattaaaattttccgagagtgataaatcaagaagagtattagagtattatttaagagataacaaattcaatgaatgtgatttatacaactgtgtagttaatcaaagttatctcaacaaccctaatcatgtggtatcattgacaggcaaagaaagagaactcagtgtaggtagaatgtttgcaatgcaaccgggaatgttcagacaggttcaaatattggcagagaaaatgatagctgaaaacattttacaattctttcctgaaagtcttacaagatatggtgatctagaactacaaaaaatattagaattgaaagcaggaataagtaacaaatcaaatcgctacaatgataattacaacaattacattagtaagtgctctatcatcacagatctcagcaaattcaatcaagcatttcgatatgaaacgtcatgtatttgtagtgatgtgctggatgaactgcatggtgtacaatctctattttcctggttacatttaactattcctcatgtcacaataatatgcacatataggcatgcacccccctatataggagatcatattgtagatcttaacaatgtagatgaacaaagtggattatatagatatcacatgggtggcatcgaagggtggtgtcaaaaactgtggaccatagaagctatatcactattggatctaatatctctcaaagggaaattctcaattactgctttaattaatggtgacaatcaatcaatagatataagcaaaccaatcagactcatggaaggtcaaactcatgctcaagcagattatttgctagcattaaatagccttaaattactgtataaagagtatgcaggcataggccacaaattaaaaggaactgagacttatatatcacgagatatgcaatttatgagtaaaacaattcaacataacggtgtatattacccagctagtataaagaaagtcctaagagtgggaccgtggataaacactatacttgatgatttcaaagtgagtctagaatctataggtagtttgacacaagaattagaatatagaggtgaaagtctattatgcagtttaatatttagaaatgtatggttatataatcagattgctctacaattaaaaaatcatgcattatgtaacaataaactatatttggacatattaaaggttctgaaacacttaaaaaccttttttaatcttgataatattgatacagcattaacattgtatatgaatttacccatgttatttggtggtggtgatcccaacttgttatatcgaagtttctatagaagaactcctgacttcctcacagaggctatagttcactctgtgttcatacttagttattatacaaaccatgacttaaaagataaacttcaagatctgtcagatgatagattgaataagttcttaacatgcataatcacgtttgacaaaaaccctaatgctgaattcgtaacattgatgagagatcctcaagctttagggtctgagagacaagctaaaattactagcgaaatcaatagactggcagttacagaggttttgagtacagctccaaacaaaatattctccaaaagtgcacaacattatactactacagagatagatctaaatgatattatgcaaaatatagaacctacatatcctcatgggctaagagttgtttatgaaagtttacccttttataaagcagagaaaatagtaaatcttatatcaggtacaaaatctataactaacatactggaaaaaacttctgccatagacttaacagatattgatagagccactgagatgatgaggaaaaacataactttgcttataaggatacttccattggattgtaacagagataaaagagagatattgagtatggaaaacctaagtattactgaattaagcaaatatgttagggaaagatcttggtctttatccaatatagttggtgttacatcacccagtatcatgtatacaatggacatcaaatatactacaagcactatatctagtggcataattatagagaaatataatgttaacagtttaacacgtggtgagagaggacccactaaaccatgggttggttcatctacacaagagaaaaaaacaatgccagtttataatagacaagtcttaaccaaaaaacagagagatcaaatagatctattagcaaaattggattgggtgtatgcatctatagataacaaggatgaattcatggaagaactcagcataggaacccttgggttaacatatgaaaaggccaagaaattatttccacaatatttaagtgtcaattatttgcatcgccttacagtcagtagtagaccatgtgaattccctgcatcaataccagcttatagaacaacaaattatcactttgacactagccctattaatcgcatattaacagaaaagtatggtgatgaagatattgacatagtattccaaaactgtataagctttggccttagtttaatgtcagtagtagaacaatttactaatgtatgtcctaacagaattattctcatacctaagcttaatgagatacatttgatgaaacctcccatattcacaggtgatgttgatattcacaagttaaaacaagtgatacaaaaacagcatatgtttttaccagacaaaataagtttgactcaatatgtggaattattcttaagtaataaaacactcaaatctggatctcatgttaattctaatttaatattggcacataaaatatctgactattttcataatacttacattttaagtactaatttagctggacattggattctgattatacaacttatgaaagattctaaaggtatttttgaaaaagattggggagagggatatataactgatcatatgtttattaatttgaaagttttcttcaatgcttataagacctatctcttgtgttttcataaaggttatggcaaagcaaagctggagtgtgatatgaacacttcagatcttctatgtgtattggaattaatagacagtagttattggaagtctatgtctaaggtatttttagaacaaaaagttatcaaatacattcttagccaagatgcaagtttacatagagtaaaaggatgtcatagcttcaaattatggtttcttaaacgtcttaatgtagcagaattcacagtttgcccttgggttgttaacatagattatcatccaacacatatgaaagcaatattaacttatatagatcttgttagaatgggattgataaatatagatagaatacacattaaaaataaacacaaattcaatgatgaattttatacttctaatctcttctacattaattataacttctcagataatactcatctattaactaaacatataaggattgctaattctgaattagaaaataattacaacaaattatatcatcctacaccagaaaccctagagaatatactagccaatccgattaaaagtaatgacaaaaagacactgaatgactattgtataggtaaaaatgttgactcaataatgttaccattgttatctaataagaagcttattaaatcgtctgcaatgattagaaccaattacagcaaacaagatttgtataatttattccctatggttgtgattgatagaattatagatcattcaggcaatacagccaaatccaaccaactttacactactacttcccaccaaatatctttagtgcacaatagcacatcactttactgcatgcttccttggcatcatattaatagattcaattttgtatttagttctacaggttgtaaaattagtatagagtatattttaaaagatcttaaaattaaagatcccaattgtatagcattcataggtgaaggagcagggaatttattattgcgtacagtagtggaacttcatcctgacataagatatatttacagaagtctgaaagattgcaatgatcatagtttacctattgagtttttaaggctgtacaatggacatatcaacattgattatggtgaaaatttgaccattcctgctacagatgcaaccaacaacattcattggtcttatttacatataaagtttgctgaacctatcagtctttttgtctgtgatgccgaattgtctgtaacagtcaactggagtaaaattataatagaatggagcaagcatgtaagaaagtgcaagtactgttcctcagttaataaatgtatgttaatagtaaaatatcatgctcaagatgatattgatttcaaattagacaatataactatattaaaaacttatgtatgcttaggcagtaagttaaagggatcggaggtttacttagtccttacaataggtcctgcgaatatattcccagtatttaatgtagtacaaaatgctaaattgatactatcaagaaccaaaaatttcatcatgcctaagaaagctgataaagagtctattgatgcaaatattaaaagtttgataccctttctttgttaccctataacaaaaaaaggaattaatactgcattgtcaaaactaaagagtgttgttagtggagatatactatcatattctatagctggacgtaatgaagttttcagcaataaacttataaatcataagcatatgaacatcttaaaatggttcaatcatgttttaaatttcagatcaacagaactaaactataaccatttatatatggtagaatctacatatccttacctaagtgaattgttaaacagcttgacaaccaatgaacttaaaaaactgattaaaatcacaggtagtctgttatacaactttcataatgaataatgaataaagatcttataataaaaattcccatagctatacactaacactgtattcaattatagttattaaaaattaaaaatcgtacgattttttaaataacttttagtgaactaatcctaaagttatcattttaatcttggaggaataaatttaaaccctaatctaattggtttatatgtgtattaactaaattacgagatattagtttttgacactttttttctcgt

SEQ ID NO: 77 - DNA, 15953 bp, Artificial Sequence
  Description of Artificial Sequence: Synthetic polynucleotide
acgcgaaaaaatgcgtacaacaaacttgcataaaccaaaaaaatggggcaaataagaatttgataagtaccacttaaatttaactcccttgcttagcgatgggttcgaattcgctatcgatgataaaagtacgtctacaaaatctatttgataatgatgaagtagcgctactaaaaataacgtgttatacggataaactaatacatctaacgaatgcgctagcgaaagcggtaatacatacgataaaactaaatggtatagtatttgtacatgtaataacgtcgtcggatatatgtccgaataataatatagtagtaaaatcgaattttacgacgatgccggtactacaaaatggtggttatatatgggaaatgatggaactaacgcattgttcgcaaccgaatggtctactagatgataattgtgaaataaaattttcgaaaaaactatcggattcgacgatgacgaattatatgaatcaactatcggaactactaggttttgatctaaatccgtaaattataattaatatcaactagcaaatcaatgtcactaacaccattagttaatataaaacttaacagaagacaaaaatggggcaaataaatcaattcagccaacccaaccatggatacgacgcataatgataatacgccgcaacgtctaatgataacggatatgcgtccgctatcgctagaaacgataataacgtcgctaacgcgtgatataataacgcataaatttatatatctaataaatcatgaatgtatagtacgtaaactagatgaacgtcaagcgacgtttacgtttctagtaaattatgaaatgaaactactacataaagtaggttcgacgaaatataaaaaatatacggaatataatacgaaatatggtacgtttccgatgccgatatttataaatcatgatggttttctagaatgtataggtataaaaccgacgaaacatacgccgataatatataaatatgatctaaatccgtaaatttcaacacaatattcacacaatctaaaacaacaactctatgcataactatactccatagtccagatggagcctgaaaattatagtaatttaaaattaaggagagatataagatagaagatggggcaaatacaaagatggctcttagcaaagtcaagttgaatgatacactcaacaaagatcaacttctgtcatccagcaaatacaccatccaacggagcacaggagatagtattgatactcctaattatgatgtgcagaaacacatcaataagttatgtggcatgttattaatcacagaagatgctaatcataaattcactgggttaataggtatgttatatgcgatgtctaggttaggaagagaagacaccataaaaatactcagagatgcgggatatcatgtaaaagcaaatggagtagatgtaacaacacatcgtcaagacattaatggaaaagaaatgaaatttgaagtgttaacattggcaagcttaacaactgaaattcaaatcaacattgagatagaatctagaaaatcctacaaaaaaatgctaaaagaaatgggagaggtagctccagaatacaggcatgactctcctgattgtgggatgataatattatgtatagcagcattagtaataactaaattagcagcaggggacagatctggtcttacagccgtgattaggagagctaataatgtcctaaaaaatgaaatgaaacgttacaaaggcttactacccaaggacatagccaacagcttctatgaagtgtttgaaaaacatccccactttatagatgtttttgttcattttggtatagcacaatcttctaccagaggtggcagtagagttgaagggatttttgcaggattgtttatgaatgcctatggtgcagggcaagtgatgttacggtggggagtcttagcaaaatcagttaaaaatattatgttaggacatgctagtgtgcaagcagaaatggaacaagttgttgaggtttatgaatatgcccaaaaattgggtggtgaagcaggattctaccatatattgaacaacccaaaagcatcattattatctttgactcaatttcctcacttctccagtgtagtattaggcaatgctgctggcctaggcataatgggagagtacagaggtacaccgaggaatcaagatctatatgatgcagcaaaggcatatgctgaacaactcaaagaaaatggtgtgattaactacagtgtactagacttgacagcagaagaactagaggctatcaaacatcagcttaatccaaaagataatgatgtagagctttgagttaataaaaaatggggcaaataaatcatcatggaaaagtttgctcctgaattccatggagaagatgcaaacaacagggctactaaattcctagaatcaataaagggcaaattcacatcacccaaagatcccaagaaaaaagatagtatcatatctgtcaactcaatagatatagaagtaaccaaagaaagccctataacatcaaattcaactattatcaacccaacaaatgagacagatgatactgcagggaacaagcccaattatcaaagaaaacctctagtaagtttcaaagaagaccctacaccaagtgataatcccttttctaaactatacaaagaaaccatagaaacatttgataacaatgaagaagaatccagctattcatacgaagaaataaatgatcagacaaacgataatataacagcaagattagataggattgatgaaaaattaagtgaaatactaggaatgcttcacacattagtagtggcaagtgcaggacctacatctgctcgggatggtataagagatgccatgattggtttaagagaagaaatgatagaaaaaatcagaactgaagcattaatgaccaatgacagattagaagctatggcaagactcaggaatgaggaaagtgaaaagatggcaaaagacacatcagatgaagtgtctctcaatccaacatcagagaaattgaacaacctattggaagggaatgatagtgacaatgatctatcacttgaagatttctgattagttaccactcttcacatcaacacacaataccaacagaagaccaacaaactaaccaacccaatcatccaaccaaacatccatccgccaatcagccaaacagccaacaaaacaaccagccaatccaaaactaaccacccggaaaaaatctataatatagttacaaaaaaaggaaagggtggggcaaatatggaaacatacgtgaacaagcttcacgaaggctccacatacacagctgctgttcaatacaatgtcttagaaaaagacgatgaccctgcatcacttacaatatgggtgcccatgttccaatcatctatgccagcagatttacttataaaagaactagctaatgtcaacatactagtgaaacaaatatccacacccaagggaccttcactaagagtcatgataaactcaagaagtgcagtgctagcacaaatgcccagcaaatttaccatatgcgctaatgtgtccttggatgaaagaagcaaactagcatatgatgtaaccacaccctgtgaaatcaaggcatgtagtctaacatgcctaaaatcaaaaaatatgttgactacagttaaagatctcactatgaagacactcaaccctacacatgatattattgctttatgtgaatttgaaaacatagtaacatcaaaaaaagtcataataccaacatacctaagatccatcagtgtcagaaataaagatctgaacacacttgaaaatataacaaccactgaattcaaaaatgctatcacaaatgcaaaaatcatcccttactcaggattactattagtcatcacagtgactgacaacaaaggagcattcaaatacataaagccacaaagtcaattcatagtagatcttggagcttacctagaaaaagaaagtatatattatgttaccacaaattggaagcacacagctacacgatttgcaatcaaacccatggaagattaacctttttcctctacatcagtgtgttaattcatacaaactttctacctacattcttcacttcaccatcacaatcacaaacactctgtggttcaaccaatcaaacaaaacttatctgaagtcccagatcatcccaagtcattgtttatcagatctagtactcaaataagttaataaaaaatatacacatggacgtccatggggcaaatgcaaacatgtttgtttttcttgttttattgccactagtctctattcagtgtgttaatcttacaaccagaactcaattaccccctgcatacactaattctttcacacgtggtgtttattaccctgacaaagttttcagatcctcagttttacattcaactcaggacttgttcttacctttcttttccaatgttacttggttccatgctatacatgtctctgggaccaatggtactaagaggtttgataaccctgtcctaccatttaatgatggtgtttattttgcttccactgagaagtctaacataataagaggctggatttttggtactactttagattcgaagacccagtccctacttattgttaataacgctactaatgttgttattaaagtctgtgaatttcaattttgtaatgatccatttttgggtgtttattaccacaaaaacaacaaaagttgtatggaaagtgagttcagagtttattctagtgcgaataattgcacttttgaatatgtctctcagccttttcttatggaccttgaaggaaaacagggtaatttcaaaaatcttagggaatttgtgtttaagaatattgatggttattttaaaatatattctaagcacacgcctattaatttagtgcgtgatctccctcagggtttttcggctttagaaccattggtagatttgccaataggtattaacatcactaggtttcaaactttacttgctttacatagaagttatttgactcctggtgattcttcttcaggttggacagctggtgctgcagcttattatgtgggttatcttcaacctaggacttttctattaaaatataatgaaaatggaaccattacagatgctgtagactgtgcacttgaccctctctcagaaacaaagtgtacgttgaaatccttcactgtagaaaaaggaatctatcaaacttctaactttagagtccaaccaacagaatctattgttagatttcctaatattacaaacttgtgcccttttggtgaagtttttaacgccaccagatttgcatctgtttatgcttggaacaggaagagaatcagcaactgtgttgctgattattctgtcctatataattccgcatcattttccacttttaagtgttatggagtgtctcctactaaattaaatgatctctgctttactaatgtctatgcagattcatttgtaattagaggtgatgaagtcagacaaatcgctccagggcaaactggaaagattgctgattataattataaattaccagatgattttacaggctgcgttatagcttggaattctaacaatcttgattctaaggttggtggtaattataattaccggtatagattgtttaggaagtctaatctcaaaccttttgagagagatatttcaactgaaatctatcaggccggtagcacaccttgtaatggtgttgaaggttttaattgttactttcctttacaatcatatggtttccaacccactaatggtgttggttaccaaccatacagagtagtagtactttcttttgaacttctacatgcaccagcaactgtttgtggacctaaaaagtctactaatttggttaaaaacaaatgtgtcaatttcaacttcaatggtttaacaggcacaggtgttcttactgagtctaacaaaaagtttctgcctttccaacaatttggcagagacattgctgacactactgatgctgtccgtgatccacagacacttgagattcttgacattacaccatgttcttttggtggtgtcagtgttataacaccaggaacaaatacttctaaccaggttgctgttctttatcagggtgttaactgcacagaagtccctgttgctattcatgcagatcaacttactcctacttggcgtgtttattctacaggttctaatgtttttcaaacacgtgcaggctgtttaataggggctgaacatgtcaacaactcatatgagtgtgacatacccattggtgcaggtatatgcgctagttatcagactcagactaattctcctcggcgggcacgtagtgtagctagtcaatccatcattgcctacactatgtcacttggtgcagaaaattcagttgcttactctaataactctattgccatacccacaaattttactattagtgttaccacagaaattctaccagtgtctatgaccaagacatcagtagattgtacaatgtacatttgtggtgattcaactgaatgcagcaatcttttgttgcaatatggcagtttttgtacacaattaaaccgtgctttaactggaatagctgttgaacaagacaaaaacacccaagaagtttttgcacaagtcaaacaaatttacaaaacaccaccaattaaagattttggtggttttaatttttcacaaatattaccagatccatcaaaaccaagcaagaggtcatttattgaagatctacttttcaacaaagtgacacttgcagatgctggcttcatcaaacaatatggtgattgccttggtgatattgctgctagagacctcatttgtgcacaaaagtttaacggccttactgttttgccacctttgctcacagatgaaatgattgctcaatacacttctgcactgttagcgggtacaatcacttctggttggacctttggtgcaggtgctgcattacaaataccatttgctatgcaaatggcttataggtttaatggtattggagttacacagaatgttctctatgagaaccaaaaattgattgccaaccaatttaatagtgctattggcaaaattcaagactcactttcttccacagcaagtgcacttggaaaacttcaagatgtggtcaaccaaaatgcacaagctttaaacacgcttgttaaacaacttagctccaattttggtgcaatttcaagtgttttaaatgatatcctttcacgtcttgacaaagttgaggctgaagtgcaaattgataggttgatcacaggcagacttcaaagtttgcagacatatgtgactcaacaattaattagagctgcagaaatcagagcttctgctaatcttgctgctactaaaatgtcagagtgtgtacttggacaatcaaaaagagttgatttttgtggaaagggctatcatcttatgtccttccctcagtcagcacctcatggtgtagtcttcttgcatgtgacttatgtccctgcacaagaaaagaacttcacaactgctcctgccatttgtcatgatggaaaagcacactttcctcgtgaaggtgtctttgtttcaaatggcacacactggtttgtaacacaaaggaatttttatgaaccacaaatcattactacagacaacacatttgtgtctggtaactgtgatgttgtaataggaattgtcaacaacacagtttatgatcctttgcaacctgaattagactcattcaaggaggagttagataaatattttaagaatcatacatcaccagatgttgatttaggtgacatctctggcattaatgcttcagttgtaaacattcaaaaagaaattgaccgcctcaatgaggttgccaagaatttaaatgaatctctcatcgatctccaagaacttggaaagtatgagcagtatataaaatggccatggtacatttggctaggttttatagctggcttgattgccatagtaatggtgacaattatgctttgctgtatgaccagttgctgtagttgtctcaagggctgttgttcttgtggatcctgctgcaaatttgatgaagacgacggactgctcctatactgtaaggccagaagcacaccaatcacactaagcaaggatcaactgagtggtataaataatattgcatttagtaactaaataaaaatagcacctaatcatgttcttacaatggtttactatctgctcatagacaacccatctatcattggattttcttaaaatctgaacttcatcgaaactcttatctataaaccatctcacttacactatttaagtagattcctagtttatagttatataaaacacaattgaatgccagtcgaccttaccatctgtaaaaatgaaaactggggcaaatatgtcacgaaggaatccttgcaaatttgaaattcgaggtcattgcttaaatggtaagaggtgtcattttagtcataattattttgaatggccaccccatgcactgcttgtaagacaaaactttatgttaaacagaatacttaagtctatggataaaagtatagataccttatcagaaataagtggagctgcagagttggacagaacagaagagtatgctcttggtgtagttggagtgctagagagttatataggatcaataaacaatataactaaacaatcagcatgtgttgccatgagcaaactcctcactgaactcaatagtgatgatatcaaaaagctgagggacaatgaagagctaaattcacccaagataagagtgtacaatactgtcatatcatatattgaaagcaacaggaaaaacaataaacaaactatccatctgttaaaaagattgccagcagacgtattgaagaaaaccatcaaaaacacattggatatccataagagcataaccatcaacaacccaaaagaatcaactgttagtgatacaaatgaccatgccaaaaataatgatactacctgacaaatatccttgtagtataacttccatactaataacaagtagatgtagagttactatgtataatcaaaagaacacactatatttcaatcaaaacaacccaaataaccatatgtactcaccgaatcaaacattcaatgaaatccattggacctctcaagaattgattgacacaattcaaaattttctacaacatctaggtattattgaggatatatatacaatatatatattagtgtcataacactcaattctaacactcaccacatcgttacattattaattcaaacaattcaagttgtgggacaaaatggatcccattattaatggaaattctgctaatgtttatctaaccgatagttatttaaaaggtgttatctctttctcagagtgtaatgctttaggaagttacatattcaatggtccttatctcaaaaatgattataccaacttaattagtagacaaaatccattaatagaacacatgaatctaaagaaactaaatataacacagtccttaatatctaagtatcataaaggtgaaataaaattagaagaacctacttattttcagtcattacttatgacatacaagagtatgacctcgtcagaacagattgctaccactaatttacttaaaaagataataagaagagctatagaaataagtgatgtcaaagtctatgctatattgaataaactagggcttaaagaaaaggacaagattaaatccaacaatggacaagatgaagacaactcagttattacgaccataatcaaagatgatatactttcagctgttaaagataatcaatctcatcttaaagcagacaaaaatcactctacaaaacaaaaagacacaatcaaaacaacactcttgaagaaattgatgtgttcaatgcaacatcctccatcatggttaatacattggtttaacttatacacaaaattaaacaacatattaacacagtatcgatcaaatgaggtaaaaaaccatgggtttacattgatagataatcaaactcttagtggatttcaatttattttgaaccaatatggttgtatagtttatcataaggaactcaaaagaattactgtgacaacctataatcaattcttgacatggaaagatattagccttagtagattaaatgtttgtttaattacatggattagtaactgcttgaacacattaaataaaagcttaggcttaagatgcggattcaataatgttatcttgacacaactattcctttatggagattgtatactaaagctatttcacaatgaggggttctacataataaaagaggtagagggatttattatgtctctaattttaaatataacagaagaagatcaattcagaaaacgattttataatagtatgctcaacaacatcacagatgctgctaataaagctcagaaaaatctgctatcaagagtatgtcatacattattagataagacagtgtccgataatataataaatggcagatggataattctattaagtaagttccttaaattaattaagcttgcaggtgacaataaccttaacaatctgagtgaactatattttttgttcagaatatttggacacccaatggtagatgaaagacaagccatggatgctgttaaaattaattgcaatgagaccaaattttacttgttaagcagtctgagtatgttaagaggtgcctttatatatagaattataaaagggtttgtaaataattacaacagatggcctactttaagaaatgctattgttttacccttaagatggttaacttactataaactaaacacttatccttctttgttggaacttacagaaagagatttgattgtgttatcaggactacgtttctatcgtgagtttcggttgcctaaaaaagtggatcttgaaatgattataaatgataaagctatatcacctcctaaaaatttgatatggactagtttccctagaaattacatgccatcacacatacaaaactatatagaacatgaaaaattaaaattttccgagagtgataaatcaagaagagtattagagtattatttaagagataacaaattcaatgaatgtgatttatacaactgtgtagttaatcaaagttatctcaacaaccctaatcatgtggtatcattgacaggcaaagaaagagaactcagtgtaggtagaatgtttgcaatgcaaccgggaatgttcagacaggttcaaatattggcagagaaaatgatagctgaaaacattttacaattctttcctgaaagtcttacaagatatggtgatctagaactacaaaaaatattagaattgaaagcaggaataagtaacaaatcaaatcgctacaatgataattacaacaattacattagtaagtgctctatcatcacagatctcagcaaattcaatcaagcatttcgatatgaaacgtcatgtatttgtagtgatgtgctggatgaactgcatggtgtacaatctctattttcctggttacatttaactattcctcatgtcacaataatatgcacatataggcatgcacccccctatataggagatcatattgtagatcttaacaatgtagatgaacaaagtggattatatagatatcacatgggtggcatcgaagggtggtgtcaaaaactgtggaccatagaagctatatcactattggatctaatatctctcaaagggaaattctcaattactgctttaattaatggtgacaatcaatcaatagatataagcaaaccaatcagactcatggaaggtcaaactcatgctcaagcagattatttgctagcattaaatagccttaaattactgtataaagagtatgcaggcataggccacaaattaaaaggaactgagacttatatatcacgagatatgcaatttatgagtaaaacaattcaacataacggtgtatattacccagctagtataaagaaagtcctaagagtgggaccgtggataaacactatacttgatgatttcaaagtgagtctagaatctataggtagtttgacacaagaattagaatatagaggtgaaagtctattatgcagtttaatatttagaaatgtatggttatataatcagattgctctacaattaaaaaatcatgcattatgtaacaataaactatatttggacatattaaaggttctgaaacacttaaaaaccttttttaatcttgataatattgatacagcattaacattgtatatgaatttacccatgttatttggtggtggtgatcccaacttgttatatcgaagtttctatagaagaactcctgacttcctcacagaggctatagttcactctgtgttcatacttagttattatacaaaccatgacttaaaagataaacttcaagatctgtcagatgatagattgaataagttcttaacatgcataatcacgtttgacaaaaaccctaatgctgaattcgtaacattgatgagagatcctcaagctttagggtctgagagacaagctaaaattactagcgaaatcaatagactggcagttacagaggttttgagtacagctccaaacaaaatattctccaaaagtgcacaacattatactactacagagatagatctaaatgatattatgcaaaatatagaacctacatatcctcatgggctaagagttgtttatgaaagtttacccttttataaagcagagaaaatagtaaatcttatatcaggtacaaaatctataactaacatactggaaaaaacttctgccatagacttaacagatattgatagagccactgagatgatgaggaaaaacataactttgcttataaggatacttccattggattgtaacagagataaaagagagatattgagtatggaaaacctaagtattactgaattaagcaaatatgttagggaaagatcttggtctttatccaatatagttggtgttacatcacccagtatcatgtatacaatggacatcaaatatactacaagcactatatctagtggcataattatagagaaatataatgttaacagtttaacacgtggtgagagaggacccactaaaccatgggttggttcatctacacaagagaaaaaaacaatgccagtttataatagacaagtcttaaccaaaaaacagagagatcaaatagatctattagcaaaattggattgggtgtatgcatctatagataacaaggatgaattcatggaagaactcagcataggaacccttgggttaacatatgaaaaggccaagaaattatttccacaatatttaagtgtcaattatttgcatcgccttacagtcagtagtagaccatgtgaattccctgcatcaataccagcttatagaacaacaaattatcactttgacactagccctattaatcgcatattaacagaaaagtatggtgatgaagatattgacatagtattccaaaactgtataagctttggccttagtttaatgtcagtagtagaacaatttactaatgtatgtcctaacagaattattctcatacctaagcttaatgagatacatttgatgaaacctcccatattcacaggtgatgttgatattcacaagttaaaacaagtgatacaaaaacagcatatgtttttaccagacaaaataagtttgactcaatatgtggaattattcttaagtaataaaacactcaaatctggatctcatgttaattctaatttaatattggcacataaaatatctgactattttcataatacttacattttaagtactaatttagctggacattggattctgattatacaacttatgaaagattctaaaggtatttttgaaaaagattggggagagggatatataactgatcatatgtttattaatttgaaagttttcttcaatgcttataagacctatctcttgtgttttcataaaggttatggcaaagcaaagctggagtgtgatatgaacacttcagatcttctatgtgtattggaattaatagacagtagttattggaagtctatgtctaaggtatttttagaacaaaaagttatcaaatacattcttagccaagatgcaagtttacatagagtaaaaggatgtcatagcttcaaattatggtttcttaaacgtcttaatgtagcagaattcacagtttgcccttgggttgttaacatagattatcatccaacacatatgaaagcaatattaacttatatagatcttgttagaatgggattgataaatatagatagaatacacattaaaaataaacacaaattcaatgatgaattttatacttctaatctcttctacattaattataacttctcagataatactcatctattaactaaacatataaggattgctaattctgaattagaaaataattacaacaaattatatcatcctacaccagaaaccctagagaatatactagccaatccgattaaaagtaatgacaaaaagacactgaatgactattgtataggtaaaaatgttgactcaataatgttaccattgttatctaataagaagcttattaaatcgtctgcaatgattagaaccaattacagcaaacaagatttgtataatttattccctatggttgtgattgatagaattatagatcattcaggcaatacagccaaatccaaccaactttacactactacttcccaccaaatatctttagtgcacaatagcacatcactttactgcatgcttccttggcatcatattaatagattcaattttgtatttagttctacaggttgtaaaattagtatagagtatattttaaaagatcttaaaattaaagatcccaattgtatagcattcataggtgaaggagcagggaatttattattgcgtacagtagtggaacttcatcctgacataagatatatttacagaagtctgaaagattgcaatgatcatagtttacctattgagtttttaaggctgtacaatggacatatcaacattgattatggtgaaaatttgaccattcctgctacagatgcaaccaacaacattcattggtcttatttacatataaagtttgctgaacctatcagtctttttgtctgtgatgccgaattgtctgtaacagtcaactggagtaaaattataatagaatggagcaagcatgtaagaaagtgcaagtactgttcctcagttaataaatgtatgttaatagtaaaatatcatgctcaagatgatattgatttcaaattagacaatataactatattaaaaacttatgtatgcttaggcagtaagttaaagggatcggaggtttacttagtccttacaataggtcctgcgaatatattcccagtatttaatgtagtacaaaatgctaaattgatactatcaagaaccaaaaatttcatcatgcctaagaaagctgataaagagtctattgatgcaaatattaaaagtttgataccctttctttgttaccctataacaaaaaaaggaattaatactgcattgtcaaaactaaagagtgttgttagtggagatatactatcatattctatagctggacgtaatgaagttttcagcaataaacttataaatcataagcatatgaacatcttaaaatggttcaatcatgttttaaatttcagatcaacagaactaaactataaccatttatatatggtagaatctacatatccttacctaagtgaattgttaaacagcttgacaaccaatgaacttaaaaaactgattaaaatcacaggtagtctgttatacaactttcataatgaataatgaataaagatcttataataaaaattcccatagctatacactaacactgtattcaattatagttattaaaaattaaaaatcgtacgattttttaaataacttttagtgaactaatcctaaagttatcattttaatcttggaggaataaatttaaaccctaatctaattggtttatatgtgtattaactaaattacgagatattagtttttgacactttttttctcgt

SEQ ID NO: 78 - DNA, 23452 bp, Artificial Sequence
  Description of Artificial Sequence: Synthetic polynucleotide
aaacggatccttcgaaacgaaattaatacgactcactatagggaagtttttcgcgtctgatgaggccgttaggccgaaactcctctccggagtcacgcgaaaaaatgcgtacaacaaacttgcataaaccaaaaaaatggggcaaataagaatttgataagtaccacttaaatttaactcccttgcttagcgatggtgagcgagctgattaaggagaacatgcacatgaagctgtacatggagggcaccgtgaacaaccaccacttcaagtgcacatccgagggcgaaggcaagccctacgagggcacccagaccatgagaatcaaggcggtcgagggcggccctctccccttcgccttcgacatcctggctaccagcttcatgtacggcagcaaaaccttcatcaaccacacccagggcatccccgacttctttaagcagtccttccccgagggcttcacatgggagagagtcaccacatacgaagacgggggcgtgctgaccgctacccaggacaccagcctccaggacggctgcctcatctacaacgtcaagatcagaggggtgaacttcccatccaacggccctgtgatgcagaagaaaacactcggctgggaggcctccaccgagaccctgtaccccgctgacggcggcctggaaggcagagccgacatggccctgaagctcgtgggcgggggccacctgatctgcaacttgaagaccacatacagatccaagaaacccgctaagaacctcaagatgcccggcgtctactatgtggacagaagactggaaagaatcaaggaggccgacaaagagacctacgtcgagcagcacgaggtggctgtggccagatactgcgacctccctagcaaactggggcacagatgagtattcaattatagttattaaaaacttaacagaagacaaaaatggggcaaataagaatttgataagtaccacttaaatttaactcccttgcttagcgatgggttcgaattcgctatcgatgataaaagtacgtctacaaaatctatttgataatgatgaagtagcgctactaaaaataacgtgttatacggataaactaatacatctaacgaatgcgctagcgaaagcggtaatacatacgataaaactaaatggtatagtatttgtacatgtaataacgtcgtcggatatatgtccgaataataatatagtagtaaaatcgaattttacgacgatgccggtactacaaaatggtggttatatatgggaaatgatggaactaacgcattgttcgcaaccgaatggtctactagatgataattgtgaaataaaattttcgaaaaaactatcggattcgacgatgacgaattatatgaatcaactatcggaactactaggttttgatctaaatccgtaaattataattaatatcaactagcaaatcaatgtcactaacaccattagttaatataaaacttaacagaagacaaaaatggggcaaataaatcaattcagccaacccaaccatggatacgacgcataatgataatacgccgcaacgtctaatgataacggatatgcgtccgctatcgctagaaacgataataacgtcgctaacgcgtgatataataacgcataaatttatatatctaataaatcatgaatgtatagtacgtaaactagatgaacgtcaagcgacgtttacgtttctagtaaattatgaaatgaaactactacataaagtaggttcgacgaaatataaaaaatatacggaatataatacgaaatatggtacgtttccgatgccgatatttataaatcatgatggttttctagaatgtataggtataaaaccgacgaaacatacgccgataatatataaatatgatctaaatccgtaaatttcaacacaatattcacacaatctaaaacaacaactctatgcataactatactccatagtccagatggagcctgaaaattatagtaatttaaaattaaggagagatataagatagaagatggggcaaatacaaagatggctcttagcaaagtcaagttgaatgatacactcaacaaagatcaacttctgtcatccagcaaatacaccatccaacggagcacaggagatagtattgatactcctaattatgatgtgcagaaacacatcaataagttatgtggcatgttattaatcacagaagatgctaatcataaattcactgggttaataggtatgttatatgcgatgtctaggttaggaagagaagacaccataaaaatactcagagatgcgggatatcatgtaaaagcaaatggagtagatgtaacaacacatcgtcaagacattaatggaaaagaaatgaaatttgaagtgttaacattggcaagcttaacaactgaaattcaaatcaacattgagatagaatctagaaaatcctacaaaaaaatgctaaaagaaatgggagaggtagctccagaatacaggcatgactctcctgattgtgggatgataatattatgtatagcagcattagtaataactaaattagcagcaggggacagatctggtcttacagccgtgattaggagagctaataatgtcctaaaaaatgaaatgaaacgttacaaaggcttactacccaaggacatagccaacagcttctatgaagtgtttgaaaaacatccccactttatagatgtttttgttcattttggtatagcacaatcttctaccagaggtggcagtagagttgaagggatttttgcaggattgtttatgaatgcctatggtgcagggcaagtgatgttacggtggggagtcttagcaaaatcagttaaaaatattatgttaggacatgctagtgtgcaagcagaaatggaacaagttgttgaggtttatgaatatgcccaaaaattgggtggtgaagcaggattctaccatatattgaacaacccaaaagcatcattattatctttgactcaatttcctcacttctccagtgtagtattaggcaatgctgctggcctaggcataatgggagagtacagaggtacaccgaggaatcaagatctatatgatgcagcaaaggcatatgctgaacaactcaaagaaaatggtgtgattaactacagtgtactagacttgacagcagaagaactagaggctatcaaacatcagcttaatccaaaagataatgatgtagagctttgagttaataaaaaatggggcaaataaatcatcatggaaaagtttgctcctgaattccatggagaagatgcaaacaacagggctactaaattcctagaatcaataaagggcaaattcacatcacccaaagatcccaagaaaaaagatagtatcatatctgtcaactcaatagatatagaagtaaccaaagaaagccctataacatcaaattcaactattatcaacccaacaaatgagacagatgatactgcagggaacaagcccaattatcaaagaaaacctctagtaagtttcaaagaagaccctacaccaagtgataatcccttttctaaactatacaaagaaaccatagaaacatttgataacaatgaagaagaatccagctattcatacgaagaaataaatgatcagacaaacgataatataacagcaagattagataggattgatgaaaaattaagtgaaatactaggaatgcttcacacattagtagtggcaagtgcaggacctacatctgctcgggatggtataagagatgccatgattggtttaagagaagaaatgatagaaaaaatcagaactgaagcattaatgaccaatgacagattagaagctatggcaagactcaggaatgaggaaagtgaaaagatggcaaaagacacatcagatgaagtgtctctcaatccaacatcagagaaattgaacaacctattggaagggaatgatagtgacaatgatctatcacttgaagatttctgattagttaccactcttcacatcaacacacaataccaacagaagaccaacaaactaaccaacccaatcatccaaccaaacatccatccgccaatcagccaaacagccaacaaaacaaccagccaatccaaaactaaccacccggaaaaaatctataatatagttacaaaaaaaggaaagggtggggcaaatatggaaacatacgtgaacaagcttcacgaaggctccacatacacagctgctgttcaatacaatgtcttagaaaaagacgatgaccctgcatcacttacaatatgggtgcccatgttccaatcatctatgccagcagatttacttataaaagaactagctaatgtcaacatactagtgaaacaaatatccacacccaagggaccttcactaagagtcatgataaactcaagaagtgcagtgctagcacaaatgcccagcaaatttaccatatgcgctaatgtgtccttggatgaaagaagcaaactagcatatgatgtaaccacaccctgtgaaatcaaggcatgtagtctaacatgcctaaaatcaaaaaatatgttgactacagttaaagatctcactatgaagacactcaaccctacacatgatattattgctttatgtgaatttgaaaacatagtaacatcaaaaaaagtcataataccaacatacctaagatccatcagtgtcagaaataaagatctgaacacacttgaaaatataacaaccactgaattcaaaaatgctatcacaaatgcaaaaatcatcccttactcaggattactattagtcatcacagtgactgacaacaaaggagcattcaaatacataaagccacaaagtcaattcatagtagatcttggagcttacctagaaaaagaaagtatatattatgttaccacaaattggaagcacacagctacacgatttgcaatcaaacccatggaagattaacctttttcctctacatcagtgtgttaattcatacaaactttctacctacattcttcacttcaccatcacaatcacaaacactctgtggttcaaccaatcaaacaaaacttatctgaagtcccagatcatcccaagtcattgtttatcagatctagtactcaaataagttaataaaaaatatacacatggacgtccatggggcaaatgcaaacatgtttgtttttcttgttttattgccactagtctctattcagtgtgttaatcttacaaccagaactcaattaccccctgcatacactaattctttcacacgtggtgtttattaccctgacaaagttttcagatcctcagttttacattcaactcaggacttgttcttacctttcttttccaatgttacttggttccatgctatacatgtctctgggaccaatggtactaagaggtttgataaccctgtcctaccatttaatgatggtgtttattttgcttccactgagaagtctaacataataagaggctggatttttggtactactttagattcgaagacccagtccctacttattgttaataacgctactaatgttgttattaaagtctgtgaatttcaattttgtaatgatccatttttgggtgtttattaccacaaaaacaacaaaagttgtatggaaagtgagttcagagtttattctagtgcgaataattgcacttttgaatatgtctctcagccttttcttatggaccttgaaggaaaacagggtaatttcaaaaatcttagggaatttgtgtttaagaatattgatggttattttaaaatatattctaagcacacgcctattaatttagtgcgtgatctccctcagggtttttcggctttagaaccattggtagatttgccaataggtattaacatcactaggtttcaaactttacttgctttacatagaagttatttgactcctggtgattcttcttcaggttggacagctggtgctgcagcttattatgtgggttatcttcaacctaggacttttctattaaaatataatgaaaatggaaccattacagatgctgtagactgtgcacttgaccctctctcagaaacaaagtgtacgttgaaatccttcactgtagaaaaaggaatctatcaaacttctaactttagagtccaaccaacagaatctattgttagatttcctaatattacaaacttgtgcccttttggtgaagtttttaacgccaccagatttgcatctgtttatgcttggaacaggaagagaatcagcaactgtgttgctgattattctgtcctatataattccgcatcattttccacttttaagtgttatggagtgtctcctactaaattaaatgatctctgctttactaatgtctatgcagattcatttgtaattagaggtgatgaagtcagacaaatcgctccagggcaaactggaaagattgctgattataattataaattaccagatgattttacaggctgcgttatagcttggaattctaacaatcttgattctaaggttggtggtaattataattaccggtatagattgtttaggaagtctaatctcaaaccttttgagagagatatttcaactgaaatctatcaggccggtagcacaccttgtaatggtgttgaaggttttaattgttactttcctttacaatcatatggtttccaacccactaatggtgttggttaccaaccatacagagtagtagtactttcttttgaacttctacatgcaccagcaactgtttgtggacctaaaaagtctactaatttggttaaaaacaaatgtgtcaatttcaacttcaatggtttaacaggcacaggtgttcttactgagtctaacaaaaagtttctgcctttccaacaatttggcagagacattgctgacactactgatgctgtccgtgatccacagacacttgagattcttgacattacaccatgttcttttggtggtgtcagtgttataacaccaggaacaaatacttctaaccaggttgctgttctttatcagggtgttaactgcacagaagtccctgttgctattcatgcagatcaacttactcctacttggcgtgtttattctacaggttctaatgtttttcaaacacgtgcaggctgtttaataggggctgaacatgtcaacaactcatatgagtgtgacatacccattggtgcaggtatatgcgctagttatcagactcagactaattctcctcggcgggcacgtagtgtagctagtcaatccatcattgcctacactatgtcacttggtgcagaaaattcagttgcttactctaataactctattgccatacccacaaattttactattagtgttaccacagaaattctaccagtgtctatgaccaagacatcagtagattgtacaatgtacatttgtggtgattcaactgaatgcagcaatcttttgttgcaatatggcagtttttgtacacaattaaaccgtgctttaactggaatagctgttgaacaagacaaaaacacccaagaagtttttgcacaagtcaaacaaatttacaaaacaccaccaattaaagattttggtggttttaatttttcacaaatattaccagatccatcaaaaccaagcaagaggtcatttattgaagatctacttttcaacaaagtgacacttgcagatgctggcttcatcaaacaatatggtgattgccttggtgatattgctgctagagacctcatttgtgcacaaaagtttaacggccttactgttttgccacctttgctcacagatgaaatgattgctcaatacacttctgcactgttagcgggtacaatcacttctggttggacctttggtgcaggtgctgcattacaaataccatttgctatgcaaatggcttataggtttaatggtattggagttacacagaatgttctctatgagaaccaaaaattgattgccaaccaatttaatagtgctattggcaaaattcaagactcactttcttccacagcaagtgcacttggaaaacttcaagatgtggtcaaccaaaatgcacaagctttaaacacgcttgttaaacaacttagctccaattttggtgcaatttcaagtgttttaaatgatatcctttcacgtcttgacaaagttgaggctgaagtgcaaattgataggttgatcacaggcagacttcaaagtttgcagacatatgtgactcaacaattaattagagctgcagaaatcagagcttctgctaatcttgctgctactaaaatgtcagagtgtgtacttggacaatcaaaaagagttgatttttgtggaaagggctatcatcttatgtccttccctcagtcagcacctcatggtgtagtcttcttgcatgtgacttatgtccctgcacaagaaaagaacttcacaactgctcctgccatttgtcatgatggaaaagcacactttcctcgtgaaggtgtctttgtttcaaatggcacacactggtttgtaacacaaaggaatttttatgaaccacaaatcattactacagacaacacatttgtgtctggtaactgtgatgttgtaataggaattgtcaacaacacagtttatgatcctttgcaacctgaattagactcattcaaggaggagttagataaatattttaagaatcatacatcaccagatgttgatttaggtgacatctctggcattaatgcttcagttgtaaacattcaaaaagaaattgaccgcctcaatgaggttgccaagaatttaaatgaatctctcatcgatctccaagaacttggaaagtatgagcagtatataaaatggccatggtacatttggctaggttttatagctggcttgattgccatagtaatggtgacaattatgctttgctgtatgaccagttgctgtagttgtctcaagggctgttgttcttgtggatcctgctgcaaatttgatgaagacgacggactgctcctatactgtaaggccagaagcacaccaatcacactaagcaaggatcaactgagtggtataaataatattgcatttagtaactaaataaaaatagcacctaatcatgttcttacaatggtttactatctgctcatagacaacccatctatcattggattttcttaaaatctgaacttcatcgaaactcttatctataaaccatctcacttacactatttaagtagattcctagtttatagttatataaaacacaattgaatgccagtcgaccttaccatctgtaaaaatgaaaactggggcaaatatgtcacgaaggaatccttgcaaatttgaaattcgaggtcattgcttaaatggtaagaggtgtcattttagtcataattattttgaatggccaccccatgcactgcttgtaagacaaaactttatgttaaacagaatacttaagtctatggataaaagtatagataccttatcagaaataagtggagctgcagagttggacagaacagaagagtatgctcttggtgtagttggagtgctagagagttatataggatcaataaacaatataactaaacaatcagcatgtgttgccatgagcaaactcctcactgaactcaatagtgatgatatcaaaaagctgagggacaatgaagagctaaattcacccaagataagagtgtacaatactgtcatatcatatattgaaagcaacaggaaaaacaataaacaaactatccatctgttaaaaagattgccagcagacgtattgaagaaaaccatcaaaaacacattggatatccataagagcataaccatcaacaacccaaaagaatcaactgttagtgatacaaatgaccatgccaaaaataatgatactacctgacaaatatccttgtagtataacttccatactaataacaagtagatgtagagttactatgtataatcaaaagaacacactatatttcaatcaaaacaacccaaataaccatatgtactcaccgaatcaaacattcaatgaaatccattggacctctcaagaattgattgacacaattcaaaattttctacaacatctaggtattattgaggatatatatacaatatatatattagtgtcataacactcaattctaacactcaccacatcgttacattattaattcaaacaattcaagttgtgggacaaaatggatcccattattaatggaaattctgctaatgtttatctaaccgatagttatttaaaaggtgttatctctttctcagagtgtaatgctttaggaagttacatattcaatggtccttatctcaaaaatgattataccaacttaattagtagacaaaatccattaatagaacacatgaatctaaagaaactaaatataacacagtccttaatatctaagtatcataaaggtgaaataaaattagaagaacctacttattttcagtcattacttatgacatacaagagtatgacctcgtcagaacagattgctaccactaatttacttaaaaagataataagaagagctatagaaataagtgatgtcaaagtctatgctatattgaataaactagggcttaaagaaaaggacaagattaaatccaacaatggacaagatgaagacaactcagttattacgaccataatcaaagatgatatactttcagctgttaaagataatcaatctcatcttaaagcagacaaaaatcactctacaaaacaaaaagacacaatcaaaacaacactcttgaagaaattgatgtgttcaatgcaacatcctccatcatggttaatacattggtttaacttatacacaaaattaaacaacatattaacacagtatcgatcaaatgaggtaaaaaaccatgggtttacattgatagataatcaaactcttagtggatttcaatttattttgaaccaatatggttgtatagtttatcataaggaactcaaaagaattactgtgacaacctataatcaattcttgacatggaaagatattagccttagtagattaaatgtttgtttaattacatggattagtaactgcttgaacacattaaataaaagcttaggcttaagatgcggattcaataatgttatcttgacacaactattcctttatggagattgtatactaaagctatttcacaatgaggggttctacataataaaagaggtagagggatttattatgtctctaattttaaatataacagaagaagatcaattcagaaaacgattttataatagtatgctcaacaacatcacagatgctgctaataaagctcagaaaaatctgctatcaagagtatgtcatacattattagataagacagtgtccgataatataataaatggcagatggataattctattaagtaagttccttaaattaattaagcttgcaggtgacaataaccttaacaatctgagtgaactatattttttgttcagaatatttggacacccaatggtagatgaaagacaagccatggatgctgttaaaattaattgcaatgagaccaaattttacttgttaagcagtctgagtatgttaagaggtgcctttatatatagaattataaaagggtttgtaaataattacaacagatggcctactttaagaaatgctattgttttacccttaagatggttaacttactataaactaaacacttatccttctttgttggaacttacagaaagagatttgattgtgttatcaggactacgtttctatcgtgagtttcggttgcctaaaaaagtggatcttgaaatgattataaatgataaagctatatcacctcctaaaaatttgatatggactagtttccctagaaattacatgccatcacacatacaaaactatatagaacatgaaaaattaaaattttccgagagtgataaatcaagaagagtattagagtattatttaagagataacaaattcaatgaatgtgatttatacaactgtgtagttaatcaaagttatctcaacaaccctaatcatgtggtatcattgacaggcaaagaaagagaactcagtgtaggtagaatgtttgcaatgcaaccgggaatgttcagacaggttcaaatattggcagagaaaatgatagctgaaaacattttacaattctttcctgaaagtcttacaagatatggtgatctagaactacaaaaaatattagaattgaaagcaggaataagtaacaaatcaaatcgctacaatgataattacaacaattacattagtaagtgctctatcatcacagatctcagcaaattcaatcaagcatttcgatatgaaacgtcatgtatttgtagtgatgtgctggatgaactgcatggtgtacaatctctattttcctggttacatttaactattcctcatgtcacaataatatgcacatataggcatgcacccccctatataggagatcatattgtagatcttaacaatgtagatgaacaaagtggattatatagatatcacatgggtggcatcgaagggtggtgtcaaaaactgtggaccatagaagctatatcactattggatctaatatctctcaaagggaaattctcaattactgctttaattaatggtgacaatcaatcaatagatataagcaaaccaatcagactcatggaaggtcaaactcatgctcaagcagattatttgctagcattaaatagccttaaattactgtataaagagtatgcaggcataggccacaaattaaaaggaactgagacttatatatcacgagatatgcaatttatgagtaaaacaattcaacataacggtgtatattacccagctagtataaagaaagtcctaagagtgggaccgtggataaacactatacttgatgatttcaaagtgagtctagaatctataggtagtttgacacaagaattagaatatagaggtgaaagtctattatgcagtttaatatttagaaatgtatggttatataatcagattgctctacaattaaaaaatcatgcattatgtaacaataaactatatttggacatattaaaggttctgaaacacttaaaaaccttttttaatcttgataatattgatacagcattaacattgtatatgaatttacccatgttatttggtggtggtgatcccaacttgttatatcgaagtttctatagaagaactcctgacttcctcacagaggctatagttcactctgtgttcatacttagttattatacaaaccatgacttaaaagataaacttcaagatctgtcagatgatagattgaataagttcttaacatgcataatcacgtttgacaaaaaccctaatgctgaattcgtaacattgatgagagatcctcaagctttagggtctgagagacaagctaaaattactagcgaaatcaatagactggcagttacagaggttttgagtacagctccaaacaaaatattctccaaaagtgcacaacattatactactacagagatagatctaaatgatattatgcaaaatatagaacctacatatcctcatgggctaagagttgtttatgaaagtttacccttttataaagcagagaaaatagtaaatcttatatcaggtacaaaatctataactaacatactggaaaaaacttctgccatagacttaacagatattgatagagccactgagatgatgaggaaaaacataactttgcttataaggatacttccattggattgtaacagagataaaagagagatattgagtatggaaaacctaagtattactgaattaagcaaatatgttagggaaagatcttggtctttatccaatatagttggtgttacatcacccagtatcatgtatacaatggacatcaaatatactacaagcactatatctagtggcataattatagagaaatataatgttaacagtttaacacgtggtgagagaggacccactaaaccatgggttggttcatctacacaagagaaaaaaacaatgccagtttataatagacaagtcttaaccaaaaaacagagagatcaaatagatctattagcaaaattggattgggtgtatgcatctatagataacaaggatgaattcatggaagaactcagcataggaacccttgggttaacatatgaaaaggccaagaaattatttccacaatatttaagtgtcaattatttgcatcgccttacagtcagtagtagaccatgtgaattccctgcatcaataccagcttatagaacaacaaattatcactttgacactagccctattaatcgcatattaacagaaaagtatggtgatgaagatattgacatagtattccaaaactgtataagctttggccttagtttaatgtcagtagtagaacaatttactaatgtatgtcctaacagaattattctcatacctaagcttaatgagatacatttgatgaaacctcccatattcacaggtgatgttgatattcacaagttaaaacaagtgatacaaaaacagcatatgtttttaccagacaaaataagtttgactcaatatgtggaattattcttaagtaataaaacactcaaatctggatctcatgttaattctaatttaatattggcacataaaatatctgactattttcataatacttacattttaagtactaatttagctggacattggattctgattatacaacttatgaaagattctaaaggtatttttgaaaaagattggggagagggatatataactgatcatatgtttattaatttgaaagttttcttcaatgcttataagacctatctcttgtgttttcataaaggttatggcaaagcaaagctggagtgtgatatgaacacttcagatcttctatgtgtattggaattaatagacagtagttattggaagtctatgtctaaggtatttttagaacaaaaagttatcaaatacattcttagccaagatgcaagtttacatagagtaaaaggatgtcatagcttcaaattatggtttcttaaacgtcttaatgtagcagaattcacagtttgcccttgggttgttaacatagattatcatccaacacatatgaaagcaatattaacttatatagatcttgttagaatgggattgataaatatagatagaatacacattaaaaataaacacaaattcaatgatgaattttatacttctaatctcttctacattaattataacttctcagataatactcatctattaactaaacatataaggattgctaattctgaattagaaaataattacaacaaattatatcatcctacaccagaaaccctagagaatatactagccaatccgattaaaagtaatgacaaaaagacactgaatgactattgtataggtaaaaatgttgactcaataatgttaccattgttatctaataagaagcttattaaatcgtctgcaatgattagaaccaattacagcaaacaagatttgtataatttattccctatggttgtgattgatagaattatagatcattcaggcaatacagccaaatccaaccaactttacactactacttcccaccaaatatctttagtgcacaatagcacatcactttactgcatgcttccttggcatcatattaatagattcaattttgtatttagttctacaggttgtaaaattagtatagagtatattttaaaagatcttaaaattaaagatcccaattgtatagcattcataggtgaaggagcagggaatttattattgcgtacagtagtggaacttcatcctgacataagatatatttacagaagtctgaaagattgcaatgatcatagtttacctattgagtttttaaggctgtacaatggacatatcaacattgattatggtgaaaatttgaccattcctgctacagatgcaaccaacaacattcattggtcttatttacatataaagtttgctgaacctatcagtctttttgtctgtgatgccgaattgtctgtaacagtcaactggagtaaaattataatagaatggagcaagcatgtaagaaagtgcaagtactgttcctcagttaataaatgtatgttaatagtaaaatatcatgctcaagatgatattgatttcaaattagacaatataactatattaaaaacttatgtatgcttaggcagtaagttaaagggatcggaggtttacttagtccttacaataggtcctgcgaatatattcccagtatttaatgtagtacaaaatgctaaattgatactatcaagaaccaaaaatttcatcatgcctaagaaagctgataaagagtctattgatgcaaatattaaaagtttgataccctttctttgttaccctataacaaaaaaaggaattaatactgcattgtcaaaactaaagagtgttgttagtggagatatactatcatattctatagctggacgtaatgaagttttcagcaataaacttataaatcataagcatatgaacatcttaaaatggttcaatcatgttttaaatttcagatcaacagaactaaactataaccatttatatatggtagaatctacatatccttacctaagtgaattgttaaacagcttgacaaccaatgaacttaaaaaactgattaaaatcacaggtagtctgttatacaactttcataatgaataatgaataaagatcttataataaaaattcccatagctatacactaacactgtattcaattatagttattaaaaattaaaaatcgtacgattttttaaataacttttagtgaactaatcctaaagttatcattttaatcttggaggaataaatttaaaccctaatctaattggtttatatgtgtattaactaaattacgagatattagtttttgacactttttttctcgtgggtcggcatggcatctccacctcctcgcggtccgacctgggcatccgaaggaggacgcacgtccactcggatggctaagggagctgctaacaaagcccgaaaggaagctgagttggctgctgccaccgctgagcaataactagcataaccccttggggcctctaaacgggtcttgaggggttttttgctgaaaggaggaactatatacgcgtaagcttctcgacccattctcatgtttgacagcttatcatcgaatttctgccattcatccgcttattatcacttattcaggcgtagcaaccaggcgtttaagggcaccaataactgccttaaaaaaattacgccccgccctgccactcatcgcagtactgttgtaattcattaagcattctgccgacatggaagccatcacagacggcatgatgaacctgaatcgccagcggcatcagcaccttgtcgccttgcgtataatatttgcccatggtgaaaacgggggcgaagaagttgtccatattggccacgtttaaatcaaaactggtgaaactcacccagggattggctgagacgaaaaacatattctcaataaaccctttagggaaataggccaggttttcaccgtaacacgccacatcttgcgaatatatgtgtagaaactgccggaaatcgtcgtggtattcactccagagcgatgaaaacgtttcagtttgctcatggaaaacggtgtaacaagggtgaacactatcccatatcaccagctcaccgtctttcattgccatacggaattccggatgagcattcatcaggcgggcaagaatgtgaataaaggccggataaaacttgtgcttatttttctttacggtctttaaaaaggccgtaatatccagctgaacggtctggttataggtacattgagcaactgactgaaatgcctcaaaatgttctttacgatgccattgggatatatcaacggtggtatatccagtgatttttttctccattttagcttccttagctcctgaaaatctcgataactcaaaaaatacgcccggtagtgatcttatttcattatggtgaaagttggaacctcttacgtgccgatcaacgtctcattttcgccaaaagttggcccagggcttcccggtatcaacagggacaccaggatttatttattctgcgaagtgatcttccgtcacaggtatttattcgcgataagctcatggagcggcgtaaccgtcgcacaggaaggacagagaaagcgcggatctgggaagtgacggacagaacggtcaggacctggattggggaggcggttgccgccgctgctgctgacggtgtgacgttctctgttccggtcacaccacatacgttccgccattcctatgcgatgcacatgctgtatgccggtataccgctgaaagttctgcaaagcctgatgggacataagtccatcagttcaacggaagtctacacgaaggtttttgcgctggatgtggctgcccggcaccgggtgcagtttgcgatgccggagtctgatgcggttgcgatgctgaaacaattatcctgagaataaatgccttggcctttatatggaaatgtggaactgagtggatatgctgtttttgtctgttaaacagagaagctggctgttatccactgagaagcgaacgaaacagtcgggaaaatctcccattatcgtagagatccgcattattaatctcaggagcctgtgtagcgtttataggaagtagtgttctgtcatgatgcctgcaagcggtaacgaaaacgatttgaatatgccttcaggaacaatagaaatcttcgtgcggtgttacgttgaagtggagcggattatgtcagcaatggacagaacaacctaatgaacacagaaccatgatgtggtctgtccttttacagccagtaggctcgccgcagtcgagcgacggcgaagccctcgagtgagcgaggaagcaccagggaacagcacttatatattctgcttacacacgatgcctgaaaaaacttcccttggggttatccacttatccacggggatatttttataattattttttttatagtttttagatcttcttttttagagcgccttgtaggcctttatccatgctggttctagagaaggtgttgtgacaaattgccctttcagtgtgacaaatcaccctcaaatgacagtcctgtctgtgacaaattgcccttaaccctgtgacaaattgccctcagaagaagctgttttttcacaaagttatccctgcttattgactcttttttatttagtgtgacaatctaaaaacttgtcacacttcacatggatctgtcatggcggaaacagcggttatcaatcacaagaaacgtaaaaatagcccgcgaatcgtccagtcaaacgacctcactgaggcggcatatagtctctcccgggatcaaaaacgtatgctgtatctgttcgttgaccagatcagaaaatctgatggcaccctacaggaacatgacggtatctgcgagatccatgttgctaaatatgctgaaatattcggattgacctctgcggaagccagtaaggatatacggcaggcattgaagagtttcgcggggaaggaagtggttttttatcgccctgaagaggatgccggcgatgaaaaaggctatgaatcttttccttggtttatcaaacgtgcgcacagtccatccagagggctttacagtgtacatatcaacccatatctcattcccttctttatcgggttacagaaccggtttacgcagtttcggcttagtgaaacaaaagaaatcaccaatccgtatgccatgcgtttatacgaatccctgtgtcagtatcgtaagccggatggctcaggcatcgtctctctgaaaatcgactggatcatagagcgttaccagctgcctcaaagttaccagcgtatgcctgacttccgccgccgcttcctgcaggtctgtgttaatgagatcaacagcagaactccaatgcgcctctcatacattgagaaaaagaaaggccgccagacgactcatatcgtattttccttccgcgatatcacttccatgacgacaggatagtctgagggttatctgtcacagatttgagggtggttcgtcacatttgttctgacctactgagggtaatttgtcacagttttgctgtttccttcagcctgcatggattttctcatactttttgaactgtaatttttaaggaagccaaatttgagggcagtttgtcacagttgatttccttctctttcccttcgtcatgtgacctgatatcgggggttagttcgtcatcattgatgagggttgattatcacagtttattactctgaattggctatccgcgtgtgtacctctacctggagtttttcccacggtggatatttcttcttgcgctgagcgtaagagctatctgacagaacagttcttctttgcttcctcgccagttcgctcgctatgctcggttacacggctgcggcgagcgctagtgataataagtgactgaggtatgtgctcttcttatctccttttgtagtgttgctcttattttaaacaactttgcggttttttgatgactttgcgattttgttgttgctttgcagtaaattgcaagatttaataaaaaaacgcaaagcaatgattaaaggatgttcagaatgaaactcatggaaacacttaaccagtgcataaacgctggtcatgaaatgacgaaggctatcgccattgcacagtttaatgatgacagcccggaagcgaggaaaataacccggcgctggagaataggtgaagcagcggatttagttggggtttcttctcaggctatcagagatgccgagaaagcagggcgactaccgcacccggatatggaaattcgaggacgggttgagcaacgtgttggttatacaattgaacaaattaatcatatgcgtgatgtgtttggtacgcgattgcgacgtgctgaagacgtatttccaccggtgatcggggttgctgcccataaaggtggcgtttacaaaacctcagtttctgttcatcttgctcaggatctggctctgaaggggctacgtgttttgctcgtggaaggtaacgacccccagggaacagcctcaatgtatcacggatgggtaccagatcttcatattcatgcagaagacactctcctgcctttctatcttggggaaaaggacgatgtcacttatgcaataaagcccacttgctggccggggcttgacattattccttcctgtctggctctgcaccgtattgaaactgagttaatgggcaaatttgatgaaggtaaactgcccaccgatccacacctgatgctccgactggccattgaaactgttgctcatgactatgatgtcatagttattgacagcgcgcctaacctgggtatcggcacgattaatgtcgtatgtgctgctgatgtgctgattgttcccacgcctgctgagttgtttgactacacctccgcactgcagtttttcgatatgcttcgtgatctgctcaagaacgttgatcttaaagggttcgagcctgatgtacgtattttgcttaccaaatacagcaatagtaatggctctcagtccccgtggatggaggagcaaattcgggatgcctggggaagcatggttctaaaaaatgttgtacgtgaaacggatgaagttggtaaaggtcagatccggatgagaactgtttttgaacaggccattgatcaacgctcttcaactggtgcctggagaaatgctctttctatttgggaacctgtctgcaatgaaattttcgatcgtctgattaaaccacgctgggagattagataatgaagcgtgcgcctgttattccaaaacatacgctcaatactcaaccggttgaagatacttcgttatcgacaccagctgccccgatggtggattcgttaattgcgcgcgtaggagtaatggctcgcggtaatgccattactttgcctgtatgtggtcgggatgtgaagtttactcttgaagtgctccggggtgatagtgttgagaagacctctcgggtatggtcaggtaatgaacgtgaccaggagctgcttactgaggacgcactggatgatctcatcccttcttttctactgactggtcaacagacaccggcgttcggtcgaagagtatctggtgtcatagaaattgccgatgggagtcgccgtcgtaaagctgctgcacttaccgaaagtgattatcgtgttctggttggcgagctggatgatgagcagatggctgcattatccagattgggtaacgattatcgcccaacaagtgcttatgaacgtggtcagcgttatgcaagccgattgcagaatgaatttgctggaaatatttctgcgctggctgatgcggaaaatatttcacgtaagattattacccgctgtatcaacaccgccaaattgcctaaatcagttgttgctcttttttctcaccccggtgaactatctgcccggtcaggtgatgcacttcaaaaagcctttacagataaagaggaattacttaagcagcaggcatctaaccttcatgagcagaaaaaagctggggtgatatttgaagctgaagaagttatcactcttttaacttctgtgcttaaaacgtcatctgcatcaagaactagtttaagctcacgacatcagtttgctcctggagcgacagtattgtataagggcgataaaatggtgcttaacctggacaggtctcgtgttccaactgagtgtatagagaaaattgaggccattcttaaggaacttgaaaagccagcaccctgatgcgaccacgttttagtctacgtttatctgtctttacttaatgtcctttgttacaggccagaaagcataactggcctgaatattctctctgggcccactgttccacttgtatcgtcggtctgataatcagactgggaccacggtcccactcgtatcgtcggtctgattattagtctgggaccacggtcccactcgtatcgtcggtctgattattagtctgggaccacggtcccactcgtatcgtcggtctgataatcagactgggaccacggtcccactcgtatcgtcggtctgattattagtctgggaccatggtcccactcgtatcgtcggtctgattattagtctgggaccacggtcccactcgtatcgtcggtctgattattagtctggaaccacggtcccactcgtatcgtcggtctgattattagtctgggaccacggtcccactcgtatcgtcggtctgattattagtctgggaccacgatcccactcgtgttgtcggtctgattatcggtctgggaccacggtcccacttgtattgtcgatcagactatcagcgtgagactacgattccatcaatgcctgtcaagggcaagtattgacatgtcgtcgtaacctgtagaacggagtaacctcggtgtgcggttgtatgcctgctgtggattgctgctgtgtcctgcttatccacaacattttgcgcacggttatgtggacaaaatacctggttacccaggccgtgccggcacgttaaccgggctgcatccgatgcaagtgtgtcgctgtcgagttt

SEQ ID NO: 79 - DNA, 22656 bp, Artificial Sequence
  Description of Artificial Sequence: Synthetic polynucleotide
aaacggatccttcgaaacgaaattaatacgactcactatagggaagtttttcgcgtctgatgaggccgttaggccgaaactcctctccggagtcacgcgaaaaaatgcgtacaacaaacttgcataaaccaaaaaaatggggcaaataagaatttgataagtaccacttaaatttaactcccttgcttagcgatgggttcgaattcgctatcgatgataaaagtacgtctacaaaatctatttgataatgatgaagtagcgctactaaaaataacgtgttatacggataaactaatacatctaacgaatgcgctagcgaaagcggtaatacatacgataaaactaaatggtatagtatttgtacatgtaataacgtcgtcggatatatgtccgaataataatatagtagtaaaatcgaattttacgacgatgccggtactacaaaatggtggttatatatgggaaatgatggaactaacgcattgttcgcaaccgaatggtctactagatgataattgtgaaataaaattttcgaaaaaactatcggattcgacgatgacgaattatatgaatcaactatcggaactactaggttttgatctaaatccgtaaattataattaatatcaactagcaaatcaatgtcactaacaccattagttaatataaaacttaacagaagacaaaaatggggcaaataaatcaattcagccaacccaaccatggatacgacgcataatgataatacgccgcaacgtctaatgataacggatatgcgtccgctatcgctagaaacgataataacgtcgctaacgcgtgatataataacgcataaatttatatatctaataaatcatgaatgtatagtacgtaaactagatgaacgtcaagcgacgtttacgtttctagtaaattatgaaatgaaactactacataaagtaggttcgacgaaatataaaaaatatacggaatataatacgaaatatggtacgtttccgatgccgatatttataaatcatgatggttttctagaatgtataggtataaaaccgacgaaacatacgccgataatatataaatatgatctaaatccgtaaatttcaacacaatattcacacaatctaaaacaacaactctatgcataactatactccatagtccagatggagcctgaaaattatagtaatttaaaattaaggagagatataagatagaagatggggcaaatacaaagatggctcttagcaaagtcaagttgaatgatacactcaacaaagatcaacttctgtcatccagcaaatacaccatccaacggagcacaggagatagtattgatactcctaattatgatgtgcagaaacacatcaataagttatgtggcatgttattaatcacagaagatgctaatcataaattcactgggttaataggtatgttatatgcgatgtctaggttaggaagagaagacaccataaaaatactcagagatgcgggatatcatgtaaaagcaaatggagtagatgtaacaacacatcgtcaagacattaatggaaaagaaatgaaatttgaagtgttaacattggcaagcttaacaactgaaattcaaatcaacattgagatagaatctagaaaatcctacaaaaaaatgctaaaagaaatgggagaggtagctccagaatacaggcatgactctcctgattgtgggatgataatattatgtatagcagcattagtaataactaaattagcagcaggggacagatctggtcttacagccgtgattaggagagctaataatgtcctaaaaaatgaaatgaaacgttacaaaggcttactacccaaggacatagccaacagcttctatgaagtgtttgaaaaacatccccactttatagatgtttttgttcattttggtatagcacaatcttctaccagaggtggcagtagagttgaagggatttttgcaggattgtttatgaatgcctatggtgcagggcaagtgatgttacggtggggagtcttagcaaaatcagttaaaaatattatgttaggacatgctagtgtgcaagcagaaatggaacaagttgttgaggtttatgaatatgcccaaaaattgggtggtgaagcaggattctaccatatattgaacaacccaaaagcatcattattatctttgactcaatttcctcacttctccagtgtagtattaggcaatgctgctggcctaggcataatgggagagtacagaggtacaccgaggaatcaagatctatatgatgcagcaaaggcatatgctgaacaactcaaagaaaatggtgtgattaactacagtgtactagacttgacagcagaagaactagaggctatcaaacatcagcttaatccaaaagataatgatgtagagctttgagttaataaaaaatggggcaaataaatcatcatggaaaagtttgctcctgaattccatggagaagatgcaaacaacagggctactaaattcctagaatcaataaagggcaaattcacatcacccaaagatcccaagaaaaaagatagtatcatatctgtcaactcaatagatatagaagtaaccaaagaaagccctataacatcaaattcaactattatcaacccaacaaatgagacagatgatactgcagggaacaagcccaattatcaaagaaaacctctagtaagtttcaaagaagaccctacaccaagtgataatcccttttctaaactatacaaagaaaccatagaaacatttgataacaatgaagaagaatccagctattcatacgaagaaataaatgatcagacaaacgataatataacagcaagattagataggattgatgaaaaattaagtgaaatactaggaatgcttcacacattagtagtggcaagtgcaggacctacatctgctcgggatggtataagagatgccatgattggtttaagagaagaaatgatagaaaaaatcagaactgaagcattaatgaccaatgacagattagaagctatggcaagactcaggaatgaggaaagtgaaaagatggcaaaagacacatcagatgaagtgtctctcaatccaacatcagagaaattgaacaacctattggaagggaatgatagtgacaatgatctatcacttgaagatttctgattagttaccactcttcacatcaacacacaataccaacagaagaccaacaaactaaccaacccaatcatccaaccaaacatccatccgccaatcagccaaacagccaacaaaacaaccagccaatccaaaactaaccacccggaaaaaatctataatatagttacaaaaaaaggaaagggtggggcaaatatggaaacatacgtgaacaagcttcacgaaggctccacatacacagctgctgttcaatacaatgtcttagaaaaagacgatgaccctgcatcacttacaatatgggtgcccatgttccaatcatctatgccagcagatttacttataaaagaactagctaatgtcaacatactagtgaaacaaatatccacacccaagggaccttcactaagagtcatgataaactcaagaagtgcagtgctagcacaaatgcccagcaaatttaccatatgcgctaatgtgtccttggatgaaagaagcaaactagcatatgatgtaaccacaccctgtgaaatcaaggcatgtagtctaacatgcctaaaatcaaaaaatatgttgactacagttaaagatctcactatgaagacactcaaccctacacatgatattattgctttatgtgaatttgaaaacatagtaacatcaaaaaaagtcataataccaacatacctaagatccatcagtgtcagaaataaagatctgaacacacttgaaaatataacaaccactgaattcaaaaatgctatcacaaatgcaaaaatcatcccttactcaggattactattagtcatcacagtgactgacaacaaaggagcattcaaatacataaagccacaaagtcaattcatagtagatcttggagcttacctagaaaaagaaagtatatattatgttaccacaaattggaagcacacagctacacgatttgcaatcaaacccatggaagattaacctttttcctctacatcagtgtgttaattcatacaaactttctacctacattcttcacttcaccatcacaatcacaaacactctgtggttcaaccaatcaaacaaaacttatctgaagtcccagatcatcccaagtcattgtttatcagatctagtactcaaataagttaataaaaaatatacacatggacgtccatggggcaaatgcaaacatgtttgtttttcttgttttattgccactagtctctattcagtgtgttaatcttacaaccagaactcaattaccccctgcatacactaattctttcacacgtggtgtttattaccctgacaaagttttcagatcctcagttttacattcaactcaggacttgttcttacctttcttttccaatgttacttggttccatgctatacatgtctctgggaccaatggtactaagaggtttgataaccctgtcctaccatttaatgatggtgtttattttgcttccactgagaagtctaacataataagaggctggatttttggtactactttagattcgaagacccagtccctacttattgttaataacgctactaatgttgttattaaagtctgtgaatttcaattttgtaatgatccatttttgggtgtttattaccacaaaaacaacaaaagttgtatggaaagtgagttcagagtttattctagtgcgaataattgcacttttgaatatgtctctcagccttttcttatggaccttgaaggaaaacagggtaatttcaaaaatcttagggaatttgtgtttaagaatattgatggttattttaaaatatattctaagcacacgcctattaatttagtgcgtgatctccctcagggtttttcggctttagaaccattggtagatttgccaataggtattaacatcactaggtttcaaactttacttgctttacatagaagttatttgactcctggtgattcttcttcaggttggacagctggtgctgcagcttattatgtgggttatcttcaacctaggacttttctattaaaatataatgaaaatggaaccattacagatgctgtagactgtgcacttgaccctctctcagaaacaaagtgtacgttgaaatccttcactgtagaaaaaggaatctatcaaacttctaactttagagtccaaccaacagaatctattgttagatttcctaatattacaaacttgtgcccttttggtgaagtttttaacgccaccagatttgcatctgtttatgcttggaacaggaagagaatcagcaactgtgttgctgattattctgtcctatataattccgcatcattttccacttttaagtgttatggagtgtctcctactaaattaaatgatctctgctttactaatgtctatgcagattcatttgtaattagaggtgatgaagtcagacaaatcgctccagggcaaactggaaagattgctgattataattataaattaccagatgattttacaggctgcgttatagcttggaattctaacaatcttgattctaaggttggtggtaattataattaccggtatagattgtttaggaagtctaatctcaaaccttttgagagagatatttcaactgaaatctatcaggccggtagcacaccttgtaatggtgttgaaggttttaattgttactttcctttacaatcatatggtttccaacccactaatggtgttggttaccaaccatacagagtagtagtactttcttttgaacttctacatgcaccagcaactgtttgtggacctaaaaagtctactaatttggttaaaaacaaatgtgtcaatttcaacttcaatggtttaacaggcacaggtgttcttactgagtctaacaaaaagtttctgcctttccaacaatttggcagagacattgctgacactactgatgctgtccgtgatccacagacacttgagattcttgacattacaccatgttcttttggtggtgtcagtgttataacaccaggaacaaatacttctaaccaggttgctgttctttatcagggtgttaactgcacagaagtccctgttgctattcatgcagatcaacttactcctacttggcgtgtttattctacaggttctaatgtttttcaaacacgtgcaggctgtttaataggggctgaacatgtcaacaactcatatgagtgtgacatacccattggtgcaggtatatgcgctagttatcagactcagactaattctcctcggcgggcacgtagtgtagctagtcaatccatcattgcctacactatgtcacttggtgcagaaaattcagttgcttactctaataactctattgccatacccacaaattttactattagtgttaccacagaaattctaccagtgtctatgaccaagacatcagtagattgtacaatgtacatttgtggtgattcaactgaatgcagcaatcttttgttgcaatatggcagtttttgtacacaattaaaccgtgctttaactggaatagctgttgaacaagacaaaaacacccaagaagtttttgcacaagtcaaacaaatttacaaaacaccaccaattaaagattttggtggttttaatttttcacaaatattaccagatccatcaaaaccaagcaagaggtcatttattgaagatctacttttcaacaaagtgacacttgcagatgctggcttcatcaaacaatatggtgattgccttggtgatattgctgctagagacctcatttgtgcacaaaagtttaacggccttactgttttgccacctttgctcacagatgaaatgattgctcaatacacttctgcactgttagcgggtacaatcacttctggttggacctttggtgcaggtgctgcattacaaataccatttgctatgcaaatggcttataggtttaatggtattggagttacacagaatgttctctatgagaaccaaaaattgattgccaaccaatttaatagtgctattggcaaaattcaagactcactttcttccacagcaagtgcacttggaaaacttcaagatgtggtcaaccaaaatgcacaagctttaaacacgcttgttaaacaacttagctccaattttggtgcaatttcaagtgttttaaatgatatcctttcacgtcttgacaaagttgaggctgaagtgcaaattgataggttgatcacaggcagacttcaaagtttgcagacatatgtgactcaacaattaattagagctgcagaaatcagagcttctgctaatcttgctgctactaaaatgtcagagtgtgtacttggacaatcaaaaagagttgatttttgtggaaagggctatcatcttatgtccttccctcagtcagcacctcatggtgtagtcttcttgcatgtgacttatgtccctgcacaagaaaagaacttcacaactgctcctgccatttgtcatgatggaaaagcacactttcctcgtgaaggtgtctttgtttcaaatggcacacactggtttgtaacacaaaggaatttttatgaaccacaaatcattactacagacaacacatttgtgtctggtaactgtgatgttgtaataggaattgtcaacaacacagtttatgatcctttgcaacctgaattagactcattcaaggaggagttagataaatattttaagaatcatacatcaccagatgttgatttaggtgacatctctggcattaatgcttcagttgtaaacattcaaaaagaaattgaccgcctcaatgaggttgccaagaatttaaatgaatctctcatcgatctccaagaacttggaaagtatgagcagtatataaaatggccatggtacatttggctaggttttatagctggcttgattgccatagtaatggtgacaattatgctttgctgtatgaccagttgctgtagttgtctcaagggctgttgttcttgtggatcctgctgcaaatttgatgaagacgacggactgctcctatactgtaaggccagaagcacaccaatcacactaagcaaggatcaactgagtggtataaataatattgcatttagtaactaaataaaaatagcacctaatcatgttcttacaatggtttactatctgctcatagacaacccatctatcattggattttcttaaaatctgaacttcatcgaaactcttatctataaaccatctcacttacactatttaagtagattcctagtttatagttatataaaacacaattgaatgccagtcgaccttaccatctgtaaaaatgaaaactggggcaaatatgtcacgaaggaatccttgcaaatttgaaattcgaggtcattgcttaaatggtaagaggtgtcattttagtcataattattttgaatggccaccccatgcactgcttgtaagacaaaactttatgttaaacagaatacttaagtctatggataaaagtatagataccttatcagaaataagtggagctgcagagttggacagaacagaagagtatgctcttggtgtagttggagtgctagagagttatataggatcaataaacaatataactaaacaatcagcatgtgttgccatgagcaaactcctcactgaactcaatagtgatgatatcaaaaagctgagggacaatgaagagctaaattcacccaagataagagtgtacaatactgtcatatcatatattgaaagcaacaggaaaaacaataaacaaactatccatctgttaaaaagattgccagcagacgtattgaagaaaaccatcaaaaacacattggatatccataagagcataaccatcaacaacccaaaagaatcaactgttagtgatacaaatgaccatgccaaaaataatgatactacctgacaaatatccttgtagtataacttccatactaataacaagtagatgtagagttactatgtataatcaaaagaacacactatatttcaatcaaaacaacccaaataaccatatgtactcaccgaatcaaacattcaatgaaatccattggacctctcaagaattgattgacacaattcaaaattttctacaacatctaggtattattgaggatatatatacaatatatatattagtgtcataacactcaattctaacactcaccacatcgttacattattaattcaaacaattcaagttgtgggacaaaatggatcccattattaatggaaattctgctaatgtttatctaaccgatagttatttaaaaggtgttatctctttctcagagtgtaatgctttaggaagttacatattcaatggtccttatctcaaaaatgattataccaacttaattagtagacaaaatccattaatagaacacatgaatctaaagaaactaaatataacacagtccttaatatctaagtatcataaaggtgaaataaaattagaagaacctacttattttcagtcattacttatgacatacaagagtatgacctcgtcagaacagattgctaccactaatttacttaaaaagataataagaagagctatagaaataagtgatgtcaaagtctatgctatattgaataaactagggcttaaagaaaaggacaagattaaatccaacaatggacaagatgaagacaactcagttattacgaccataatcaaagatgatatactttcagctgttaaagataatcaatctcatcttaaagcagacaaaaatcactctacaaaacaaaaagacacaatcaaaacaacactcttgaagaaattgatgtgttcaatgcaacatcctccatcatggttaatacattggtttaacttatacacaaaattaaacaacatattaacacagtatcgatcaaatgaggtaaaaaaccatgggtttacattgatagataatcaaactcttagtggatttcaatttattttgaaccaatatggttgtatagtttatcataaggaactcaaaagaattactgtgacaacctataatcaattcttgacatggaaagatattagccttagtagattaaatgtttgtttaattacatggattagtaactgcttgaacacattaaataaaagcttaggcttaagatgcggattcaataatgttatcttgacacaactattcctttatggagattgtatactaaagctatttcacaatgaggggttctacataataaaagaggtagagggatttattatgtctctaattttaaatataacagaagaagatcaattcagaaaacgattttataatagtatgctcaacaacatcacagatgctgctaataaagctcagaaaaatctgctatcaagagtatgtcatacattattagataagacagtgtccgataatataataaatggcagatggataattctattaagtaagttccttaaattaattaagcttgcaggtgacaataaccttaacaatctgagtgaactatattttttgttcagaatatttggacacccaatggtagatgaaagacaagccatggatgctgttaaaattaattgcaatgagaccaaattttacttgttaagcagtctgagtatgttaagaggtgcctttatatatagaattataaaagggtttgtaaataattacaacagatggcctactttaagaaatgctattgttttacccttaagatggttaacttactataaactaaacacttatccttctttgttggaacttacagaaagagatttgattgtgttatcaggactacgtttctatcgtgagtttcggttgcctaaaaaagtggatcttgaaatgattataaatgataaagctatatcacctcctaaaaatttgatatggactagtttccctagaaattacatgccatcacacatacaaaactatatagaacatgaaaaattaaaattttccgagagtgataaatcaagaagagtattagagtattatttaagagataacaaattcaatgaatgtgatttatacaactgtgtagttaatcaaagttatctcaacaaccctaatcatgtggtatcattgacaggcaaagaaagagaactcagtgtaggtagaatgtttgcaatgcaaccgggaatgttcagacaggttcaaatattggcagagaaaatgatagctgaaaacattttacaattctttcctgaaagtcttacaagatatggtgatctagaactacaaaaaatattagaattgaaagcaggaataagtaacaaatcaaatcgctacaatgataattacaacaattacattagtaagtgctctatcatcacagatctcagcaaattcaatcaagcatttcgatatgaaacgtcatgtatttgtagtgatgtgctggatgaactgcatggtgtacaatctctattttcctggttacatttaactattcctcatgtcacaataatatgcacatataggcatgcacccccctatataggagatcatattgtagatcttaacaatgtagatgaacaaagtggattatatagatatcacatgggtggcatcgaagggtggtgtcaaaaactgtggaccatagaagctatatcactattggatctaatatctctcaaagggaaattctcaattactgctttaattaatggtgacaatcaatcaatagatataagcaaaccaatcagactcatggaaggtcaaactcatgctcaagcagattatttgctagcattaaatagccttaaattactgtataaagagtatgcaggcataggccacaaattaaaaggaactgagacttatatatcacgagatatgcaatttatgagtaaaacaattcaacataacggtgtatattacccagctagtataaagaaagtcctaagagtgggaccgtggataaacactatacttgatgatttcaaagtgagtctagaatctataggtagtttgacacaagaattagaatatagaggtgaaagtctattatgcagtttaatatttagaaatgtatggttatataatcagattgctctacaattaaaaaatcatgcattatgtaacaataaactatatttggacatattaaaggttctgaaacacttaaaaaccttttttaatcttgataatattgatacagcattaacattgtatatgaatttacccatgttatttggtggtggtgatcccaacttgttatatcgaagtttctatagaagaactcctgacttcctcacagaggctatagttcactctgtgttcatacttagttattatacaaaccatgacttaaaagataaacttcaagatctgtcagatgatagattgaataagttcttaacatgcataatcacgtttgacaaaaaccctaatgctgaattcgtaacattgatgagagatcctcaagctttagggtctgagagacaagctaaaattactagcgaaatcaatagactggcagttacagaggttttgagtacagctccaaacaaaatattctccaaaagtgcacaacattatactactacagagatagatctaaatgatattatgcaaaatatagaacctacatatcctcatgggctaagagttgtttatgaaagtttacccttttataaagcagagaaaatagtaaatcttatatcaggtacaaaatctataactaacatactggaaaaaacttctgccatagacttaacagatattgatagagccactgagatgatgaggaaaaacataactttgcttataaggatacttccattggattgtaacagagataaaagagagatattgagtatggaaaacctaagtattactgaattaagcaaatatgttagggaaagatcttggtctttatccaatatagttggtgttacatcacccagtatcatgtatacaatggacatcaaatatactacaagcactatatctagtggcataattatagagaaatataatgttaacagtttaacacgtggtgagagaggacccactaaaccatgggttggttcatctacacaagagaaaaaaacaatgccagtttataatagacaagtcttaaccaaaaaacagagagatcaaatagatctattagcaaaattggattgggtgtatgcatctatagataacaaggatgaattcatggaagaactcagcataggaacccttgggttaacatatgaaaaggccaagaaattatttccacaatatttaagtgtcaattatttgcatcgccttacagtcagtagtagaccatgtgaattccctgcatcaataccagcttatagaacaacaaattatcactttgacactagccctattaatcgcatattaacagaaaagtatggtgatgaagatattgacatagtattccaaaactgtataagctttggccttagtttaatgtcagtagtagaacaatttactaatgtatgtcctaacagaattattctcatacctaagcttaatgagatacatttgatgaaacctcccatattcacaggtgatgttgatattcacaagttaaaacaagtgatacaaaaacagcatatgtttttaccagacaaaataagtttgactcaatatgtggaattattcttaagtaataaaacactcaaatctggatctcatgttaattctaatttaatattggcacataaaatatctgactattttcataatacttacattttaagtactaatttagctggacattggattctgattatacaacttatgaaagattctaaaggtatttttgaaaaagattggggagagggatatataactgatcatatgtttattaatttgaaagttttcttcaatgcttataagacctatctcttgtgttttcataaaggttatggcaaagcaaagctggagtgtgatatgaacacttcagatcttctatgtgtattggaattaatagacagtagttattggaagtctatgtctaaggtatttttagaacaaaaagttatcaaatacattcttagccaagatgcaagtttacatagagtaaaaggatgtcatagcttcaaattatggtttcttaaacgtcttaatgtagcagaattcacagtttgcccttgggttgttaacatagattatcatccaacacatatgaaagcaatattaacttatatagatcttgttagaatgggattgataaatatagatagaatacacattaaaaataaacacaaattcaatgatgaattttatacttctaatctcttctacattaattataacttctcagataatactcatctattaactaaacatataaggattgctaattctgaattagaaaataattacaacaaattatatcatcctacaccagaaaccctagagaatatactagccaatccgattaaaagtaatgacaaaaagacactgaatgactattgtataggtaaaaatgttgactcaataatgttaccattgttatctaataagaagcttattaaatcgtctgcaatgattagaaccaattacagcaaacaagatttgtataatttattccctatggttgtgattgatagaattatagatcattcaggcaatacagccaaatccaaccaactttacactactacttcccaccaaatatctttagtgcacaatagcacatcactttactgcatgcttccttggcatcatattaatagattcaattttgtatttagttctacaggttgtaaaattagtatagagtatattttaaaagatcttaaaattaaagatcccaattgtatagcattcataggtgaaggagcagggaatttattattgcgtacagtagtggaacttcatcctgacataagatatatttacagaagtctgaaagattgcaatgatcatagtttacctattgagtttttaaggctgtacaatggacatatcaacattgattatggtgaaaatttgaccattcctgctacagatgcaaccaacaacattcattggtcttatttacatataaagtttgctgaacctatcagtctttttgtctgtgatgccgaattgtctgtaacagtcaactggagtaaaattataatagaatggagcaagcatgtaagaaagtgcaagtactgttcctcagttaataaatgtatgttaatagtaaaatatcatgctcaagatgatattgatttcaaattagacaatataactatattaaaaacttatgtatgcttaggcagtaagttaaagggatcggaggtttacttagtccttacaataggtcctgcgaatatattcccagtatttaatgtagtacaaaatgctaaattgatactatcaagaaccaaaaatttcatcatgcctaagaaagctgataaagagtctattgatgcaaatattaaaagtttgataccctttctttgttaccctataacaaaaaaaggaattaatactgcattgtcaaaactaaagagtgttgttagtggagatatactatcatattctatagctggacgtaatgaagttttcagcaataaacttataaatcataagcatatgaacatcttaaaatggttcaatcatgttttaaatttcagatcaacagaactaaactataaccatttatatatggtagaatctacatatccttacctaagtgaattgttaaacagcttgacaaccaatgaacttaaaaaactgattaaaatcacaggtagtctgttatacaactttcataatgaataatgaataaagatcttataataaaaattcccatagctatacactaacactgtattcaattatagttattaaaaattaaaaatcgtacgattttttaaataacttttagtgaactaatcctaaagttatcattttaatcttggaggaataaatttaaaccctaatctaattggtttatatgtgtattaactaaattacgagatattagtttttgacactttttttctcgtgggtcggcatggcatctccacctcctcgcggtccgacctgggcatccgaaggaggacgcacgtccactcggatggctaagggagctgctaacaaagcccgaaaggaagctgagttggctgctgccaccgctgagcaataactagcataaccccttggggcctctaaacgggtcttgaggggttttttgctgaaaggaggaactatatacgcgtaagcttctcgacccattctcatgtttgacagcttatcatcgaatttctgccattcatccgcttattatcacttattcaggcgtagcaaccaggcgtttaagggcaccaataactgccttaaaaaaattacgccccgccctgccactcatcgcagtactgttgtaattcattaagcattctgccgacatggaagccatcacagacggcatgatgaacctgaatcgccagcggcatcagcaccttgtcgccttgcgtataatatttgcccatggtgaaaacgggggcgaagaagttgtccatattggccacgtttaaatcaaaactggtgaaactcacccagggattggctgagacgaaaaacatattctcaataaaccctttagggaaataggccaggttttcaccgtaacacgccacatcttgcgaatatatgtgtagaaactgccggaaatcgtcgtggtattcactccagagcgatgaaaacgtttcagtttgctcatggaaaacggtgtaacaagggtgaacactatcccatatcaccagctcaccgtctttcattgccatacggaattccggatgagcattcatcaggcgggcaagaatgtgaataaaggccggataaaacttgtgcttatttttctttacggtctttaaaaaggccgtaatatccagctgaacggtctggttataggtacattgagcaactgactgaaatgcctcaaaatgttctttacgatgccattgggatatatcaacggtggtatatccagtgatttttttctccattttagcttccttagctcctgaaaatctcgataactcaaaaaatacgcccggtagtgatcttatttcattatggtgaaagttggaacctcttacgtgccgatcaacgtctcattttcgccaaaagttggcccagggcttcccggtatcaacagggacaccaggatttatttattctgcgaagtgatcttccgtcacaggtatttattcgcgataagctcatggagcggcgtaaccgtcgcacaggaaggacagagaaagcgcggatctgggaagtgacggacagaacggtcaggacctggattggggaggcggttgccgccgctgctgctgacggtgtgacgttctctgttccggtcacaccacatacgttccgccattcctatgcgatgcacatgctgtatgccggtataccgctgaaagttctgcaaagcctgatgggacataagtccatcagttcaacggaagtctacacgaaggtttttgcgctggatgtggctgcccggcaccgggtgcagtttgcgatgccggagtctgatgcggttgcgatgctgaaacaattatcctgagaataaatgccttggcctttatatggaaatgtggaactgagtggatatgctgtttttgtctgttaaacagagaagctggctgttatccactgagaagcgaacgaaacagtcgggaaaatctcccattatcgtagagatccgcattattaatctcaggagcctgtgtagcgtttataggaagtagtgttctgtcatgatgcctgcaagcggtaacgaaaacgatttgaatatgccttcaggaacaatagaaatcttcgtgcggtgttacgttgaagtggagcggattatgtcagcaatggacagaacaacctaatgaacacagaaccatgatgtggtctgtccttttacagccagtaggctcgccgcagtcgagcgacggcgaagccctcgagtgagcgaggaagcaccagggaacagcacttatatattctgcttacacacgatgcctgaaaaaacttcccttggggttatccacttatccacggggatatttttataattattttttttatagtttttagatcttcttttttagagcgccttgtaggcctttatccatgctggttctagagaaggtgttgtgacaaattgccctttcagtgtgacaaatcaccctcaaatgacagtcctgtctgtgacaaattgcccttaaccctgtgacaaattgccctcagaagaagctgttttttcacaaagttatccctgcttattgactcttttttatttagtgtgacaatctaaaaacttgtcacacttcacatggatctgtcatggcggaaacagcggttatcaatcacaagaaacgtaaaaatagcccgcgaatcgtccagtcaaacgacctcactgaggcggcatatagtctctcccgggatcaaaaacgtatgctgtatctgttcgttgaccagatcagaaaatctgatggcaccctacaggaacatgacggtatctgcgagatccatgttgctaaatatgctgaaatattcggattgacctctgcggaagccagtaaggatatacggcaggcattgaagagtttcgcggggaaggaagtggttttttatcgccctgaagaggatgccggcgatgaaaaaggctatgaatcttttccttggtttatcaaacgtgcgcacagtccatccagagggctttacagtgtacatatcaacccatatctcattcccttctttatcgggttacagaaccggtttacgcagtttcggcttagtgaaacaaaagaaatcaccaatccgtatgccatgcgtttatacgaatccctgtgtcagtatcgtaagccggatggctcaggcatcgtctctctgaaaatcgactggatcatagagcgttaccagctgcctcaaagttaccagcgtatgcctgacttccgccgccgcttcctgcaggtctgtgttaatgagatcaacagcagaactccaatgcgcctctcatacattgagaaaaagaaaggccgccagacgactcatatcgtattttccttccgcgatatcacttccatgacgacaggatagtctgagggttatctgtcacagatttgagggtggttcgtcacatttgttctgacctactgagggtaatttgtcacagttttgctgtttccttcagcctgcatggattttctcatactttttgaactgtaatttttaaggaagccaaatttgagggcagtttgtcacagttgatttccttctctttcccttcgtcatgtgacctgatatcgggggttagttcgtcatcattgatgagggttgattatcacagtttattactctgaattggctatccgcgtgtgtacctctacctggagtttttcccacggtggatatttcttcttgcgctgagcgtaagagctatctgacagaacagttcttctttgcttcctcgccagttcgctcgctatgctcggttacacggctgcggcgagcgctagtgataataagtgactgaggtatgtgctcttcttatctccttttgtagtgttgctcttattttaaacaactttgcggttttttgatgactttgcgattttgttgttgctttgcagtaaattgcaagatttaataaaaaaacgcaaagcaatgattaaaggatgttcagaatgaaactcatggaaacacttaaccagtgcataaacgctggtcatgaaatgacgaaggctatcgccattgcacagtttaatgatgacagcccggaagcgaggaaaataacccggcgctggagaataggtgaagcagcggatttagttggggtttcttctcaggctatcagagatgccgagaaagcagggcgactaccgcacccggatatggaaattcgaggacgggttgagcaacgtgttggttatacaattgaacaaattaatcatatgcgtgatgtgtttggtacgcgattgcgacgtgctgaagacgtatttccaccggtgatcggggttgctgcccataaaggtggcgtttacaaaacctcagtttctgttcatcttgctcaggatctggctctgaaggggctacgtgttttgctcgtggaaggtaacgacccccagggaacagcctcaatgtatcacggatgggtaccagatcttcatattcatgcagaagacactctcctgcctttctatcttggggaaaaggacgatgtcacttatgcaataaagcccacttgctggccggggcttgacattattccttcctgtctggctctgcaccgtattgaaactgagttaatgggcaaatttgatgaaggtaaactgcccaccgatccacacctgatgctccgactggccattgaaactgttgctcatgactatgatgtcatagttattgacagcgcgcctaacctgggtatcggcacgattaatgtcgtatgtgctgctgatgtgctgattgttcccacgcctgctgagttgtttgactacacctccgcactgcagtttttcgatatgcttcgtgatctgctcaagaacgttgatcttaaagggttcgagcctgatgtacgtattttgcttaccaaatacagcaatagtaatggctctcagtccccgtggatggaggagcaaattcgggatgcctggggaagcatggttctaaaaaatgttgtacgtgaaacggatgaagttggtaaaggtcagatccggatgagaactgtttttgaacaggccattgatcaacgctcttcaactggtgcctggagaaatgctctttctatttgggaacctgtctgcaatgaaattttcgatcgtctgattaaaccacgctgggagattagataatgaagcgtgcgcctgttattccaaaacatacgctcaatactcaaccggttgaagatacttcgttatcgacaccagctgccccgatggtggattcgttaattgcgcgcgtaggagtaatggctcgcggtaatgccattactttgcctgtatgtggtcgggatgtgaagtttactcttgaagtgctccggggtgatagtgttgagaagacctctcgggtatggtcaggtaatgaacgtgaccaggagctgcttactgaggacgcactggatgatctcatcccttcttttctactgactggtcaacagacaccggcgttcggtcgaagagtatctggtgtcatagaaattgccgatgggagtcgccgtcgtaaagctgctgcacttaccgaaagtgattatcgtgttctggttggcgagctggatgatgagcagatggctgcattatccagattgggtaacgattatcgcccaacaagtgcttatgaacgtggtcagcgttatgcaagccgattgcagaatgaatttgctggaaatatttctgcgctggctgatgcggaaaatatttcacgtaagattattacccgctgtatcaacaccgccaaattgcctaaatcagttgttgctcttttttctcaccccggtgaactatctgcccggtcaggtgatgcacttcaaaaagcctttacagataaagaggaattacttaagcagcaggcatctaaccttcatgagcagaaaaaagctggggtgatatttgaagctgaagaagttatcactcttttaacttctgtgcttaaaacgtcatctgcatcaagaactagtttaagctcacgacatcagtttgctcctggagcgacagtattgtataagggcgataaaatggtgcttaacctggacaggtctcgtgttccaactgagtgtatagagaaaattgaggccattcttaaggaacttgaaaagccagcaccctgatgcgaccacgttttagtctacgtttatctgtctttacttaatgtcctttgttacaggccagaaagcataactggcctgaatattctctctgggcccactgttccacttgtatcgtcggtctgataatcagactgggaccacggtcccactcgtatcgtcggtctgattattagtctgggaccacggtcccactcgtatcgtcggtctgattattagtctgggaccacggtcccactcgtatcgtcggtctgataatcagactgggaccacggtcccactcgtatcgtcggtctgattattagtctgggaccatggtcccactcgtatcgtcggtctgattattagtctgggaccacggtcccactcgtatcgtcggtctgattattagtctggaaccacggtcccactcgtatcgtcggtctgattattagtctgggaccacggtcccactcgtatcgtcggtctgattattagtctgggaccacgatcccactcgtgttgtcggtctgattatcggtctgggaccacggtcccacttgtattgtcgatcagactatcagcgtgagactacgattccatcaatgcctgtcaagggcaagtattgacatgtcgtcgtaacctgtagaacggagtaacctcggtgtgcggttgtatgcctgctgtggattgctgctgtgtcctgcttatccacaacattttgcgcacggttatgtggacaaaatacctggttacccaggccgtgccggcacgttaaccgggctgcatccgatgcaagtgtgtcgctgtcgagttt

SEQ ID NO: 80 - protein, 1290 aa, Artificial Sequence
  Description of Artificial Sequence: Synthetic polypeptide
MFVFLVLLPLVSSQCVNFTNRTQLPSAYTNSFTRGVYYPDKVFRSSVLHSTQDLFLPFFSNVTWFHAIHVSGTNGTKRFDNPVLPFNDGVYFASTEKSNIIRGWIFGTTLDSKTQSLLIVNNATNVVIKVCEFQFCNYPFLGVYYHKNNKSWMESEFRVYSSANNCTFEYVSQPFLMDLEGKQGNFKNLSEFVFKNIDGYFKIYSKHTPINLVRDLPQGFSALEPLVDLPIGINITRFQTLLALHRSYLTPGDSSSGWTAGAAAYYVGYLQPRTFLLKYNENGTITDAVDCALDPLSETKCTLKSFTVEKGIYQTSNFRVQPTESIVRFPNITNLCPFGEVFNATRFASVYAWNRKRISNCVADYSVLYNSASFSTFKCYGVSPTKLNDLCFTNVYADSFVIRGDEVRQIAPGQTGTIADYNYKLPDDFTGCVIAWNSNNLDSKVGGNYNYLYRLFRKSNLKPFERDISTEIYQAGSTPCNGVKGFNCYFPLQSYGFQPTYGVGYQPYRVVVLSFELLHAPATVCGPKKSTNLVKNKCVNFNFNGLTGTGVLTESNKKFLPFQQFGRDIADTTDAVRDPQTLEILDITPCSFGGVSVITPGTNTSNQVAVLYQGVNCTEVPVAIHADQLTPTWRVYSTGSNVFQTRAGCLIGAEYVNNSYECDIPIGAGICASYQTQTNSPRRARSVASQSIIAYTMSLGAENSVAYSNNSIAIPTNFTISVTTEILPVSMTKTSVDCTMYICGDSTECSNLLLQYGSFCTQLNRALTGIAVEQDKNTQEVFAQVKQIYKTPPIKDFGGFNFSQILPDPSKPSKRSFIEDLLFNKVTLADAGFIKQYGDCLGDIAARDLICAQKFNGLTVLPPLLTDEMIAQYTSALLAGTITSGWTFGAGAALQIPFAMQMAYRFNGIGVTQNVLYENQKLIANQFNSAIGKIQDSLSSTASALGKLQDVVNQNAQALNTLVKQLSSNFGAISSVLNDILSRLDKVEAEVQIDRLITGRLQSLQTYVTQQLIRAAEIRASANLAAIKMSECVLGQSKRVDFCGKGYHLMSFPQSAPHGVVFLHVTYVPAQEKNFTTAPAICHDGKAHFPREGVFVSNGTHWFVTQRNFYEPQIITTDNTFVSGNCDVVIGIVNNTVYDPLQPELDSFKEELDKYFKNHTSPDVDLGDISGINASFVNIQKEIDRLNEVAKNLNESLIDLQELGKYEQYIKWPWYIWLGFIAGLIAIVMVTIMLCCMTSCCSCLKGCCSCGSCCKFDEDDGLLLYCKARSTPITLSKDQLSGINNIAFSN

SEQ ID NO: 81 - DNA, 3873 bp, Artificial Sequence
  Description of Artificial Sequence: Synthetic polynucleotide
atgtttgtttttcttgttttattgccactagtctctagtcagtgtgttaattttacaaacagaactcaattaccctctgcatacactaattctttcacacgtggtgtttattaccctgacaaagttttcagatcctcagttttacattcaactcaggacttgttcttacctttcttttccaatgttacttggttccatgctatacatgtctctgggaccaatggtactaagaggtttgataaccctgtcctaccatttaatgatggtgtttattttgcttccactgagaagtctaacataataagaggctggatttttggtactactttagattcgaagacccagtccctacttattgttaataacgctactaatgttgttattaaagtctgtgaatttcaattttgtaattatccatttttgggtgtttattaccacaaaaacaacaaaagttggatggaaagtgagttcagagtttattctagtgcgaataattgcacttttgaatatgtctctcagccttttcttatggaccttgaaggaaaacagggtaatttcaaaaatcttagtgaatttgtgtttaagaatattgatggttattttaaaatatattctaagcacacgcctattaatttagtgcgtgatctccctcagggtttttcggctttagaaccattggtagatttgccaataggtattaacatcactaggtttcaaactttacttgctttacatagaagttatttgactcctggtgattcttcttcaggttggacagctggtgctgcagcttattatgtgggttatcttcaacctaggacttttctattaaaatataatgaaaatggaaccattacagatgctgtagactgtgcacttgaccctctctcagaaacaaagtgtacgttgaaatccttcactgtagaaaaaggaatctatcaaacttctaactttagagtccaaccaacagaatctattgttagatttcctaatattacaaacttgtgcccttttggtgaagtttttaacgccaccagatttgcatctgtttatgcttggaacaggaagagaatcagcaactgtgttgctgattattctgtcctatataattccgcatcattttccacttttaagtgttatggagtgtctcctactaaattaaatgatctctgctttactaatgtctatgcagattcatttgtaattagaggtgatgaagtcagacaaatcgctccagggcaaactggaacgattgctgattataattataaattaccagatgattttacaggctgcgttatagcttggaattctaacaatcttgattctaaggttggtggtaattataattacctgtatagattgtttaggaagtctaatctcaaaccttttgagagagatatttcaactgaaatctatcaggccggtagcacaccttgtaatggtgttaaaggttttaattgttactttcctttacaatcatatggtttccaacccacttatggtgttggttaccaaccatacagagtagtagtactttcttttgaacttctacatgcaccagcaactgtttgtggacctaaaaagtctactaatttggttaaaaacaaatgtgtcaatttcaacttcaatggtttaacaggcacaggtgttcttactgagtctaacaaaaagtttctgcctttccaacaatttggcagagacattgctgacactactgatgctgtccgtgatccacagacacttgagattcttgacattacaccatgttcttttggtggtgtcagtgttataacaccaggaacaaatacttctaaccaggttgctgttctttatcagggtgttaactgcacagaagtccctgttgctattcatgcagatcaacttactcctacttggcgtgtttattctacaggttctaatgtttttcaaacacgtgcaggctgtttaataggggctgaatatgtcaacaactcatatgagtgtgacatacccattggtgcaggtatatgcgctagttatcagactcagactaattctcctcggcgggcacgtagtgtagctagtcaatccatcattgcctacactatgtcacttggtgcagaaaattcagttgcttactctaataactctattgccatacccacaaattttactattagtgttaccacagaaattctaccagtgtctatgaccaagacatcagtagattgtacaatgtacatttgtggtgattcaactgaatgcagcaatcttttgttgcaatatggcagtttttgtacacaattaaaccgtgctttaactggaatagctgttgaacaagacaaaaacacccaagaagtttttgcacaagtcaaacaaatttacaaaacaccaccaattaaagattttggtggttttaatttttcacaaatattaccagatccatcaaaaccaagcaagaggtcatttattgaagatctacttttcaacaaagtgacacttgcagatgctggcttcatcaaacaatatggtgattgccttggtgatattgctgctagagacctcatttgtgcacaaaagtttaacggccttactgttttgccacctttgctcacagatgaaatgattgctcaatacacttctgcactgttagcgggtacaatcacttctggttggacctttggtgcaggtgctgcattacaaataccatttgctatgcaaatggcttataggtttaatggtattggagttacacagaatgttctctatgagaaccaaaaattgattgccaaccaatttaatagtgctattggcaaaattcaagactcactttcttccacagcaagtgcacttggaaaacttcaagatgtggtcaaccaaaatgcacaagctttaaacacgcttgttaaacaacttagctccaattttggtgcaatttcaagtgttttaaatgatatcctttcacgtcttgacaaagttgaggctgaagtgcaaattgataggttgatcacaggcagacttcaaagtttgcagacatatgtgactcaacaattaattagagctgcagaaatcagagcttctgctaatcttgctgctattaaaatgtcagagtgtgtacttggacaatcaaaaagagttgatttttgtggaaagggctatcatcttatgtccttccctcagtcagcacctcatggtgtagtcttcttgcatgtgacttatgtccctgcacaagaaaagaacttcacaactgctcctgccatttgtcatgatggaaaagcacactttcctcgtgaaggtgtctttgtttcaaatggcacacactggtttgtaacacaaaggaatttttatgaaccacaaatcattactacagacaacacatttgtgtctggtaactgtgatgttgtaataggaattgtcaacaacacagtttatgatcctttgcaacctgaattagactcattcaaggaggagttagataaatattttaagaatcatacatcaccagatgttgatttaggtgacatctctggcattaatgcttcatttgtaaacattcaaaaagaaattgaccgcctcaatgaggttgccaagaatttaaatgaatctctcatcgatctccaagaacttggaaagtatgagcagtatataaaatggccatggtacatttggctaggttttatagctggcttgattgccatagtaatggtgacaattatgctttgctgtatgaccagttgctgtagttgtctcaagggctgttgttcttgtggatcctgctgcaaatttgatgaagacgacggactgctcctatactgtaaggccagaagcacaccaatcacactaagcaaggatcaactgagtggtataaataatattgcatttagtaactaa

SEQ ID NO: 82 - DNA, 16749 bp, Artificial Sequence
  Description of Artificial Sequence: Synthetic polynucleotide
acgcgaaaaaatgcgtacaacaaacttgcataaaccaaaaaaatggggcaaataagaatttgataagtaccacttaaatttaactcccttgcttagcgatggtgagcgagctgattaaggagaacatgcacatgaagctgtacatggagggcaccgtgaacaaccaccacttcaagtgcacatccgagggcgaaggcaagccctacgagggcacccagaccatgagaatcaaggcggtcgagggcggccctctccccttcgccttcgacatcctggctaccagcttcatgtacggcagcaaaaccttcatcaaccacacccagggcatccccgacttctttaagcagtccttccccgagggcttcacatgggagagagtcaccacatacgaagacgggggcgtgctgaccgctacccaggacaccagcctccaggacggctgcctcatctacaacgtcaagatcagaggggtgaacttcccatccaacggccctgtgatgcagaagaaaacactcggctgggaggcctccaccgagaccctgtaccccgctgacggcggcctggaaggcagagccgacatggccctgaagctcgtgggcgggggccacctgatctgcaacttgaagaccacatacagatccaagaaacccgctaagaacctcaagatgcccggcgtctactatgtggacagaagactggaaagaatcaaggaggccgacaaagagacctacgtcgagcagcacgaggtggctgtggccagatactgcgacctccctagcaaactggggcacagatgagtattcaattatagttattaaaaacttaacagaagacaaaaatggggcaaataagaatttgataagtaccacttaaatttaactcccttgcttagcgatgggttcgaattcgctatcgatgataaaagtacgtctacaaaatctatttgataatgatgaagtagcgctactaaaaataacgtgttatacggataaactaatacatctaacgaatgcgctagcgaaagcggtaatacatacgataaaactaaatggtatagtatttgtacatgtaataacgtcgtcggatatatgtccgaataataatatagtagtaaaatcgaattttacgacgatgccggtactacaaaatggtggttatatatgggaaatgatggaactaacgcattgttcgcaaccgaatggtctactagatgataattgtgaaataaaattttcgaaaaaactatcggattcgacgatgacgaattatatgaatcaactatcggaactactaggttttgatctaaatccgtaaattataattaatatcaactagcaaatcaatgtcactaacaccattagttaatataaaacttaacagaagacaaaaatggggcaaataaatcaattcagccaacccaaccatggatacgacgcataatgataatacgccgcaacgtctaatgataacggatatgcgtccgctatcgctagaaacgataataacgtcgctaacgcgtgatataataacgcataaatttatatatctaataaatcatgaatgtatagtacgtaaactagatgaacgtcaagcgacgtttacgtttctagtaaattatgaaatgaaactactacataaagtaggttcgacgaaatataaaaaatatacggaatataatacgaaatatggtacgtttccgatgccgatatttataaatcatgatggttttctagaatgtataggtataaaaccgacgaaacatacgccgataatatataaatatgatctaaatccgtaaatttcaacacaatattcacacaatctaaaacaacaactctatgcataactatactccatagtccagatggagcctgaaaattatagtaatttaaaattaaggagagatataagatagaagatggggcaaatacaaagatggctcttagcaaagtcaagttgaatgatacactcaacaaagatcaacttctgtcatccagcaaatacaccatccaacggagcacaggagatagtattgatactcctaattatgatgtgcagaaacacatcaataagttatgtggcatgttattaatcacagaagatgctaatcataaattcactgggttaataggtatgttatatgcgatgtctaggttaggaagagaagacaccataaaaatactcagagatgcgggatatcatgtaaaagcaaatggagtagatgtaacaacacatcgtcaagacattaatggaaaagaaatgaaatttgaagtgttaacattggcaagcttaacaactgaaattcaaatcaacattgagatagaatctagaaaatcctacaaaaaaatgctaaaagaaatgggagaggtagctccagaatacaggcatgactctcctgattgtgggatgataatattatgtatagcagcattagtaataactaaattagcagcaggggacagatctggtcttacagccgtgattaggagagctaataatgtcctaaaaaatgaaatgaaacgttacaaaggcttactacccaaggacatagccaacagcttctatgaagtgtttgaaaaacatccccactttatagatgtttttgttcattttggtatagcacaatcttctaccagaggtggcagtagagttgaagggatttttgcaggattgtttatgaatgcctatggtgcagggcaagtgatgttacggtggggagtcttagcaaaatcagttaaaaatattatgttaggacatgctagtgtgcaagcagaaatggaacaagttgttgaggtttatgaatatgcccaaaaattgggtggtgaagcaggattctaccatatattgaacaacccaaaagcatcattattatctttgactcaatttcctcacttctccagtgtagtattaggcaatgctgctggcctaggcataatgggagagtacagaggtacaccgaggaatcaagatctatatgatgcagcaaaggcatatgctgaacaactcaaagaaaatggtgtgattaactacagtgtactagacttgacagcagaagaactagaggctatcaaacatcagcttaatccaaaagataatgatgtagagctttgagttaataaaaaatggggcaaataaatcatcatggaaaagtttgctcctgaattccatggagaagatgcaaacaacagggctactaaattcctagaatcaataaagggcaaattcacatcacccaaagatcccaagaaaaaagatagtatcatatctgtcaactcaatagatatagaagtaaccaaagaaagccctataacatcaaattcaactattatcaacccaacaaatgagacagatgatactgcagggaacaagcccaattatcaaagaaaacctctagtaagtttcaaagaagaccctacaccaagtgataatcccttttctaaactatacaaagaaaccatagaaacatttgataacaatgaagaagaatccagctattcatacgaagaaataaatgatcagacaaacgataatataacagcaagattagataggattgatgaaaaattaagtgaaatactaggaatgcttcacacattagtagtggcaagtgcaggacctacatctgctcgggatggtataagagatgccatgattggtttaagagaagaaatgatagaaaaaatcagaactgaagcattaatgaccaatgacagattagaagctatggcaagactcaggaatgaggaaagtgaaaagatggcaaaagacacatcagatgaagtgtctctcaatccaacatcagagaaattgaacaacctattggaagggaatgatagtgacaatgatctatcacttgaagatttctgattagttaccactcttcacatcaacacacaataccaacagaagaccaacaaactaaccaacccaatcatccaaccaaacatccatccgccaatcagccaaacagccaacaaaacaaccagccaatccaaaactaaccacccggaaaaaatctataatatagttacaaaaaaaggaaagggtggggcaaatatggaaacatacgtgaacaagcttcacgaaggctccacatacacagctgctgttcaatacaatgtcttagaaaaagacgatgaccctgcatcacttacaatatgggtgcccatgttccaatcatctatgccagcagatttacttataaaagaactagctaatgtcaacatactagtgaaacaaatatccacacccaagggaccttcactaagagtcatgataaactcaagaagtgcagtgctagcacaaatgcccagcaaatttaccatatgcgctaatgtgtccttggatgaaagaagcaaactagcatatgatgtaaccacaccctgtgaaatcaaggcatgtagtctaacatgcctaaaatcaaaaaatatgttgactacagttaaagatctcactatgaagacactcaaccctacacatgatattattgctttatgtgaatttgaaaacatagtaacatcaaaaaaagtcataataccaacatacctaagatccatcagtgtcagaaataaagatctgaacacacttgaaaatataacaaccactgaattcaaaaatgctatcacaaatgcaaaaatcatcccttactcaggattactattagtcatcacagtgactgacaacaaaggagcattcaaatacataaagccacaaagtcaattcatagtagatcttggagcttacctagaaaaagaaagtatatattatgttaccacaaattggaagcacacagctacacgatttgcaatcaaacccatggaagattaacctttttcctctacatcagtgtgttaattcatacaaactttctacctacattcttcacttcaccatcacaatcacaaacactctgtggttcaaccaatcaaacaaaacttatctgaagtcccagatcatcccaagtcattgtttatcagatctagtactcaaataagttaataaaaaatatacacatggacgtccatggggcaaatgcaaacatgtttgtttttcttgttttattgccactagtctctagtcagtgtgttaattttacaaacagaactcaattaccctctgcatacactaattctttcacacgtggtgtttattaccctgacaaagttttcagatcctcagttttacattcaactcaggacttgttcttacctttcttttccaatgttacttggttccatgctatacatgtctctgggaccaatggtactaagaggtttgataaccctgtcctaccatttaatgatggtgtttattttgcttccactgagaagtctaacataataagaggctggatttttggtactactttagattcgaagacccagtccctacttattgttaataacgctactaatgttgttattaaagtctgtgaatttcaattttgtaattatccatttttgggtgtttattaccacaaaaacaacaaaagttggatggaaagtgagttcagagtttattctagtgcgaataattgcacttttgaatatgtctctcagccttttcttatggaccttgaaggaaaacagggtaatttcaaaaatcttagtgaatttgtgtttaagaatattgatggttattttaaaatatattctaagcacacgcctattaatttagtgcgtgatctccctcagggtttttcggctttagaaccattggtagatttgccaataggtattaacatcactaggtttcaaactttacttgctttacatagaagttatttgactcctggtgattcttcttcaggttggacagctggtgctgcagcttattatgtgggttatcttcaacctaggacttttctattaaaatataatgaaaatggaaccattacagatgctgtagactgtgcacttgaccctctctcagaaacaaagtgtacgttgaaatccttcactgtagaaaaaggaatctatcaaacttctaactttagagtccaaccaacagaatctattgttagatttcctaatattacaaacttgtgcccttttggtgaagtttttaacgccaccagatttgcatctgtttatgcttggaacaggaagagaatcagcaactgtgttgctgattattctgtcctatataattccgcatcattttccacttttaagtgttatggagtgtctcctactaaattaaatgatctctgctttactaatgtctatgcagattcatttgtaattagaggtgatgaagtcagacaaatcgctccagggcaaactggaacgattgctgattataattataaattaccagatgattttacaggctgcgttatagcttggaattctaacaatcttgattctaaggttggtggtaattataattacctgtatagattgtttaggaagtctaatctcaaaccttttgagagagatatttcaactgaaatctatcaggccggtagcacaccttgtaatggtgttaaaggttttaattgttactttcctttacaatcatatggtttccaacccacttatggtgttggttaccaaccatacagagtagtagtactttcttttgaacttctacatgcaccagcaactgtttgtggacctaaaaagtctactaatttggttaaaaacaaatgtgtcaatttcaacttcaatggtttaacaggcacaggtgttcttactgagtctaacaaaaagtttctgcctttccaacaatttggcagagacattgctgacactactgatgctgtccgtgatccacagacacttgagattcttgacattacaccatgttcttttggtggtgtcagtgttataacaccaggaacaaatacttctaaccaggttgctgttctttatcagggtgttaactgcacagaagtccctgttgctattcatgcagatcaacttactcctacttggcgtgtttattctacaggttctaatgtttttcaaacacgtgcaggctgtttaataggggctgaatatgtcaacaactcatatgagtgtgacatacccattggtgcaggtatatgcgctagttatcagactcagactaattctcctcggcgggcacgtagtgtagctagtcaatccatcattgcctacactatgtcacttggtgcagaaaattcagttgcttactctaataactctattgccatacccacaaattttactattagtgttaccacagaaattctaccagtgtctatgaccaagacatcagtagattgtacaatgtacatttgtggtgattcaactgaatgcagcaatcttttgttgcaatatggcagtttttgtacacaattaaaccgtgctttaactggaatagctgttgaacaagacaaaaacacccaagaagtttttgcacaagtcaaacaaatttacaaaacaccaccaattaaagattttggtggttttaatttttcacaaatattaccagatccatcaaaaccaagcaagaggtcatttattgaagatctacttttcaacaaagtgacacttgcagatgctggcttcatcaaacaatatggtgattgccttggtgatattgctgctagagacctcatttgtgcacaaaagtttaacggccttactgttttgccacctttgctcacagatgaaatgattgctcaatacacttctgcactgttagcgggtacaatcacttctggttggacctttggtgcaggtgctgcattacaaataccatttgctatgcaaatggcttataggtttaatggtattggagttacacagaatgttctctatgagaaccaaaaattgattgccaaccaatttaatagtgctattggcaaaattcaagactcactttcttccacagcaagtgcacttggaaaacttcaagatgtggtcaaccaaaatgcacaagctttaaacacgcttgttaaacaacttagctccaattttggtgcaatttcaagtgttttaaatgatatcctttcacgtcttgacaaagttgaggctgaagtgcaaattgataggttgatcacaggcagacttcaaagtttgcagacatatgtgactcaacaattaattagagctgcagaaatcagagcttctgctaatcttgctgctattaaaatgtcagagtgtgtacttggacaatcaaaaagagttgatttttgtggaaagggctatcatcttatgtccttccctcagtcagcacctcatggtgtagtcttcttgcatgtgacttatgtccctgcacaagaaaagaacttcacaactgctcctgccatttgtcatgatggaaaagcacactttcctcgtgaaggtgtctttgtttcaaatggcacacactggtttgtaacacaaaggaatttttatgaaccacaaatcattactacagacaacacatttgtgtctggtaactgtgatgttgtaataggaattgtcaacaacacagtttatgatcctttgcaacctgaattagactcattcaaggaggagttagataaatattttaagaatcatacatcaccagatgttgatttaggtgacatctctggcattaatgcttcatttgtaaacattcaaaaagaaattgaccgcctcaatgaggttgccaagaatttaaatgaatctctcatcgatctccaagaacttggaaagtatgagcagtatataaaatggccatggtacatttggctaggttttatagctggcttgattgccatagtaatggtgacaattatgctttgctgtatgaccagttgctgtagttgtctcaagggctgttgttcttgtggatcctgctgcaaatttgatgaagacgacggactgctcctatactgtaaggccagaagcacaccaatcacactaagcaaggatcaactgagtggtataaataatattgcatttagtaactaaataaaaatagcacctaatcatgttcttacaatggtttactatctgctcatagacaacccatctatcattggattttcttaaaatctgaacttcatcgaaactcttatctataaaccatctcacttacactatttaagtagattcctagtttatagttatataaaacacaattgaatgccagtcgaccttaccatctgtaaaaatgaaaactggggcaaatatgtcacgaaggaatccttgcaaatttgaaattcgaggtcattgcttaaatggtaagaggtgtcattttagtcataattattttgaatggccaccccatgcactgcttgtaagacaaaactttatgttaaacagaatacttaagtctatggataaaagtatagataccttatcagaaataagtggagctgcagagttggacagaacagaagagtatgctcttggtgtagttggagtgctagagagttatataggatcaataaacaatataactaaacaatcagcatgtgttgccatgagcaaactcctcactgaactcaatagtgatgatatcaaaaagctgagggacaatgaagagctaaattcacccaagataagagtgtacaatactgtcatatcatatattgaaagcaacaggaaaaacaataaacaaactatccatctgttaaaaagattgccagcagacgtattgaagaaaaccatcaaaaacacattggatatccataagagcataaccatcaacaacccaaaagaatcaactgttagtgatacaaatgaccatgccaaaaataatgatactacctgacaaatatccttgtagtataacttccatactaataacaagtagatgtagagttactatgtataatcaaaagaacacactatatttcaatcaaaacaacccaaataaccatatgtactcaccgaatcaaacattcaatgaaatccattggacctctcaagaattgattgacacaattcaaaattttctacaacatctaggtattattgaggatatatatacaatatatatattagtgtcataacactcaattctaacactcaccacatcgttacattattaattcaaacaattcaagttgtgggacaaaatggatcccattattaatggaaattctgctaatgtttatctaaccgatagttatttaaaaggtgttatctctttctcagagtgtaatgctttaggaagttacatattcaatggtccttatctcaaaaatgattataccaacttaattagtagacaaaatccattaatagaacacatgaatctaaagaaactaaatataacacagtccttaatatctaagtatcataaaggtgaaataaaattagaagaacctacttattttcagtcattacttatgacatacaagagtatgacctcgtcagaacagattgctaccactaatttacttaaaaagataataagaagagctatagaaataagtgatgtcaaagtctatgctatattgaataaactagggcttaaagaaaaggacaagattaaatccaacaatggacaagatgaagacaactcagttattacgaccataatcaaagatgatatactttcagctgttaaagataatcaatctcatcttaaagcagacaaaaatcactctacaaaacaaaaagacacaatcaaaacaacactcttgaagaaattgatgtgttcaatgcaacatcctccatcatggttaatacattggtttaacttatacacaaaattaaacaacatattaacacagtatcgatcaaatgaggtaaaaaaccatgggtttacattgatagataatcaaactcttagtggatttcaatttattttgaaccaatatggttgtatagtttatcataaggaactcaaaagaattactgtgacaacctataatcaattcttgacatggaaagatattagccttagtagattaaatgtttgtttaattacatggattagtaactgcttgaacacattaaataaaagcttaggcttaagatgcggattcaataatgttatcttgacacaactattcctttatggagattgtatactaaagctatttcacaatgaggggttctacataataaaagaggtagagggatttattatgtctctaattttaaatataacagaagaagatcaattcagaaaacgattttataatagtatgctcaacaacatcacagatgctgctaataaagctcagaaaaatctgctatcaagagtatgtcatacattattagataagacagtgtccgataatataataaatggcagatggataattctattaagtaagttccttaaattaattaagcttgcaggtgacaataaccttaacaatctgagtgaactatattttttgttcagaatatttggacacccaatggtagatgaaagacaagccatggatgctgttaaaattaattgcaatgagaccaaattttacttgttaagcagtctgagtatgttaagaggtgcctttatatatagaattataaaagggtttgtaaataattacaacagatggcctactttaagaaatgctattgttttacccttaagatggttaacttactataaactaaacacttatccttctttgttggaacttacagaaagagatttgattgtgttatcaggactacgtttctatcgtgagtttcggttgcctaaaaaagtggatcttgaaatgattataaatgataaagctatatcacctcctaaaaatttgatatggactagtttccctagaaattacatgccatcacacatacaaaactatatagaacatgaaaaattaaaattttccgagagtgataaatcaagaagagtattagagtattatttaagagataacaaattcaatgaatgtgatttatacaactgtgtagttaatcaaagttatctcaacaaccctaatcatgtggtatcattgacaggcaaagaaagagaactcagtgtaggtagaatgtttgcaatgcaaccgggaatgttcagacaggttcaaatattggcagagaaaatgatagctgaaaacattttacaattctttcctgaaagtcttacaagatatggtgatctagaactacaaaaaatattagaattgaaagcaggaataagtaacaaatcaaatcgctacaatgataattacaacaattacattagtaagtgctctatcatcacagatctcagcaaattcaatcaagcatttcgatatgaaacgtcatgtatttgtagtgatgtgctggatgaactgcatggtgtacaatctctattttcctggttacatttaactattcctcatgtcacaataatatgcacatataggcatgcacccccctatataggagatcatattgtagatcttaacaatgtagatgaacaaagtggattatatagatatcacatgggtggcatcgaagggtggtgtcaaaaactgtggaccatagaagctatatcactattggatctaatatctctcaaagggaaattctcaattactgctttaattaatggtgacaatcaatcaatagatataagcaaaccaatcagactcatggaaggtcaaactcatgctcaagcagattatttgctagcattaaatagccttaaattactgtataaagagtatgcaggcataggccacaaattaaaaggaactgagacttatatatcacgagatatgcaatttatgagtaaaacaattcaacataacggtgtatattacccagctagtataaagaaagtcctaagagtgggaccgtggataaacactatacttgatgatttcaaagtgagtctagaatctataggtagtttgacacaagaattagaatatagaggtgaaagtctattatgcagtttaatatttagaaatgtatggttatataatcagattgctctacaattaaaaaatcatgcattatgtaacaataaactatatttggacatattaaaggttctgaaacacttaaaaaccttttttaatcttgataatattgatacagcattaacattgtatatgaatttacccatgttatttggtggtggtgatcccaacttgttatatcgaagtttctatagaagaactcctgacttcctcacagaggctatagttcactctgtgttcatacttagttattatacaaaccatgacttaaaagataaacttcaagatctgtcagatgatagattgaataagttcttaacatgcataatcacgtttgacaaaaaccctaatgctgaattcgtaacattgatgagagatcctcaagctttagggtctgagagacaagctaaaattactagcgaaatcaatagactggcagttacagaggttttgagtacagctccaaacaaaatattctccaaaagtgcacaacattatactactacagagatagatctaaatgatattatgcaaaatatagaacctacatatcctcatgggctaagagttgtttatgaaagtttacccttttataaagcagagaaaatagtaaatcttatatcaggtacaaaatctataactaacatactggaaaaaacttctgccatagacttaacagatattgatagagccactgagatgatgaggaaaaacataactttgcttataaggatacttccattggattgtaacagagataaaagagagatattgagtatggaaaacctaagtattactgaattaagcaaatatgttagggaaagatcttggtctttatccaatatagttggtgttacatcacccagtatcatgtatacaatggacatcaaatatactacaagcactatatctagtggcataattatagagaaatataatgttaacagtttaacacgtggtgagagaggacccactaaaccatgggttggttcatctacacaagagaaaaaaacaatgccagtttataatagacaagtcttaaccaaaaaacagagagatcaaatagatctattagcaaaattggattgggtgtatgcatctatagataacaaggatgaattcatggaagaactcagcataggaacccttgggttaacatatgaaaaggccaagaaattatttccacaatatttaagtgtcaattatttgcatcgccttacagtcagtagtagaccatgtgaattccctgcatcaataccagcttatagaacaacaaattatcactttgacactagccctattaatcgcatattaacagaaaagtatggtgatgaagatattgacatagtattccaaaactgtataagctttggccttagtttaatgtcagtagtagaacaatttactaatgtatgtcctaacagaattattctcatacctaagcttaatgagatacatttgatgaaacctcccatattcacaggtgatgttgatattcacaagttaaaacaagtgatacaaaaacagcatatgtttttaccagacaaaataagtttgactcaatatgtggaattattcttaagtaataaaacactcaaatctggatctcatgttaattctaatttaatattggcacataaaatatctgactattttcataatacttacattttaagtactaatttagctggacattggattctgattatacaacttatgaaagattctaaaggtatttttgaaaaagattggggagagggatatataactgatcatatgtttattaatttgaaagttttcttcaatgcttataagacctatctcttgtgttttcataaaggttatggcaaagcaaagctggagtgtgatatgaacacttcagatcttctatgtgtattggaattaatagacagtagttattggaagtctatgtctaaggtatttttagaacaaaaagttatcaaatacattcttagccaagatgcaagtttacatagagtaaaaggatgtcatagcttcaaattatggtttcttaaacgtcttaatgtagcagaattcacagtttgcccttgggttgttaacatagattatcatccaacacatatgaaagcaatattaacttatatagatcttgttagaatgggattgataaatatagatagaatacacattaaaaataaacacaaattcaatgatgaattttatacttctaatctcttctacattaattataacttctcagataatactcatctattaactaaacatataaggattgctaattctgaattagaaaataattacaacaaattatatcatcctacaccagaaaccctagagaatatactagccaatccgattaaaagtaatgacaaaaagacactgaatgactattgtataggtaaaaatgttgactcaataatgttaccattgttatctaataagaagcttattaaatcgtctgcaatgattagaaccaattacagcaaacaagatttgtataatttattccctatggttgtgattgatagaattatagatcattcaggcaatacagccaaatccaaccaactttacactactacttcccaccaaatatctttagtgcacaatagcacatcactttactgcatgcttccttggcatcatattaatagattcaattttgtatttagttctacaggttgtaaaattagtatagagtatattttaaaagatcttaaaattaaagatcccaattgtatagcattcataggtgaaggagcagggaatttattattgcgtacagtagtggaacttcatcctgacataagatatatttacagaagtctgaaagattgcaatgatcatagtttacctattgagtttttaaggctgtacaatggacatatcaacattgattatggtgaaaatttgaccattcctgctacagatgcaaccaacaacattcattggtcttatttacatataaagtttgctgaacctatcagtctttttgtctgtgatgccgaattgtctgtaacagtcaactggagtaaaattataatagaatggagcaagcatgtaagaaagtgcaagtactgttcctcagttaataaatgtatgttaatagtaaaatatcatgctcaagatgatattgatttcaaattagacaatataactatattaaaaacttatgtatgcttaggcagtaagttaaagggatcggaggtttacttagtccttacaataggtcctgcgaatatattcccagtatttaatgtagtacaaaatgctaaattgatactatcaagaaccaaaaatttcatcatgcctaagaaagctgataaagagtctattgatgcaaatattaaaagtttgataccctttctttgttaccctataacaaaaaaaggaattaatactgcattgtcaaaactaaagagtgttgttagtggagatatactatcatattctatagctggacgtaatgaagttttcagcaataaacttataaatcataagcatatgaacatcttaaaatggttcaatcatgttttaaatttcagatcaacagaactaaactataaccatttatatatggtagaatctacatatccttacctaagtgaattgttaaacagcttgacaaccaatgaacttaaaaaactgattaaaatcacaggtagtctgttatacaactttcataatgaataatgaataaagatcttataataaaaattcccatagctatacactaacactgtattcaattatagttattaaaaattaaaaatcgtacgattttttaaataacttttagtgaactaatcctaaagttatcattttaatcttggaggaataaatttaaaccctaatctaattggtttatatgtgtattaactaaattacgagatattagtttttgacactttttttctcgt

SEQ ID NO: 83 - DNA, 15953 bp, Artificial Sequence
  Description of Artificial Sequence: Synthetic polynucleotide
acgcgaaaaaatgcgtacaacaaacttgcataaaccaaaaaaatggggcaaataagaatttgataagtaccacttaaatttaactcccttgcttagcgatgggttcgaattcgctatcgatgataaaagtacgtctacaaaatctatttgataatgatgaagtagcgctactaaaaataacgtgttatacggataaactaatacatctaacgaatgcgctagcgaaagcggtaatacatacgataaaactaaatggtatagtatttgtacatgtaataacgtcgtcggatatatgtccgaataataatatagtagtaaaatcgaattttacgacgatgccggtactacaaaatggtggttatatatgggaaatgatggaactaacgcattgttcgcaaccgaatggtctactagatgataattgtgaaataaaattttcgaaaaaactatcggattcgacgatgacgaattatatgaatcaactatcggaactactaggttttgatctaaatccgtaaattataattaatatcaactagcaaatcaatgtcactaacaccattagttaatataaaacttaacagaagacaaaaatggggcaaataaatcaattcagccaacccaaccatggatacgacgcataatgataatacgccgcaacgtctaatgataacggatatgcgtccgctatcgctagaaacgataataacgtcgctaacgcgtgatataataacgcataaatttatatatctaataaatcatgaatgtatagtacgtaaactagatgaacgtcaagcgacgtttacgtttctagtaaattatgaaatgaaactactacataaagtaggttcgacgaaatataaaaaatatacggaatataatacgaaatatggtacgtttccgatgccgatatttataaatcatgatggttttctagaatgtataggtataaaaccgacgaaacatacgccgataatatataaatatgatctaaatccgtaaatttcaacacaatattcacacaatctaaaacaacaactctatgcataactatactccatagtccagatggagcctgaaaattatagtaatttaaaattaaggagagatataagatagaagatggggcaaatacaaagatggctcttagcaaagtcaagttgaatgatacactcaacaaagatcaacttctgtcatccagcaaatacaccatccaacggagcacaggagatagtattgatactcctaattatgatgtgcagaaacacatcaataagttatgtggcatgttattaatcacagaagatgctaatcataaattcactgggttaataggtatgttatatgcgatgtctaggttaggaagagaagacaccataaaaatactcagagatgcgggatatcatgtaaaagcaaatggagtagatgtaacaacacatcgtcaagacattaatggaaaagaaatgaaatttgaagtgttaacattggcaagcttaacaactgaaattcaaatcaacattgagatagaatctagaaaatcctacaaaaaaatgctaaaagaaatgggagaggtagctccagaatacaggcatgactctcctgattgtgggatgataatattatgtatagcagcattagtaataactaaattagcagcaggggacagatctggtcttacagccgtgattaggagagctaataatgtcctaaaaaatgaaatgaaacgttacaaaggcttactacccaaggacatagccaacagcttctatgaagtgtttgaaaaacatccccactttatagatgtttttgttcattttggtatagcacaatcttctaccagaggtggcagtagagttgaagggatttttgcaggattgtttatgaatgcctatggtgcagggcaagtgatgttacggtggggagtcttagcaaaatcagttaaaaatattatgttaggacatgctagtgtgcaagcagaaatggaacaagttgttgaggtttatgaatatgcccaaaaattgggtggtgaagcaggattctaccatatattgaacaacccaaaagcatcattattatctttgactcaatttcctcacttctccagtgtagtattaggcaatgctgctggcctaggcataatgggagagtacagaggtacaccgaggaatcaagatctatatgatgcagcaaaggcatatgctgaacaactcaaagaaaatggtgtgattaactacagtgtactagacttgacagcagaagaactagaggctatcaaacatcagcttaatccaaaagataatgatgtagagctttgagttaataaaaaatggggcaaataaatcatcatggaaaagtttgctcctgaattccatggagaagatgcaaacaacagggctactaaattcctagaatcaataaagggcaaattcacatcacccaaagatcccaagaaaaaagatagtatcatatctgtcaactcaatagatatagaagtaaccaaagaaagccctataacatcaaattcaactattatcaacccaacaaatgagacagatgatactgcagggaacaagcccaattatcaaagaaaacctctagtaagtttcaaagaagaccctacaccaagtgataatcccttttctaaactatacaaagaaaccatagaaacatttgataacaatgaagaagaatccagctattcatacgaagaaataaatgatcagacaaacgataatataacagcaagattagataggattgatgaaaaattaagtgaaatactaggaatgcttcacacattagtagtggcaagtgcaggacctacatctgctcgggatggtataagagatgccatgattggtttaagagaagaaatgatagaaaaaatcagaactgaagcattaatgaccaatgacagattagaagctatggcaagactcaggaatgaggaaagtgaaaagatggcaaaagacacatcagatgaagtgtctctcaatccaacatcagagaaattgaacaacctattggaagggaatgatagtgacaatgatctatcacttgaagatttctgattagttaccactcttcacatcaacacacaataccaacagaagaccaacaaactaaccaacccaatcatccaaccaaacatccatccgccaatcagccaaacagccaacaaaacaaccagccaatccaaaactaaccacccggaaaaaatctataatatagttacaaaaaaaggaaagggtggggcaaatatggaaacatacgtgaacaagcttcacgaaggctccacatacacagctgctgttcaatacaatgtcttagaaaaagacgatgaccctgcatcacttacaatatgggtgcccatgttccaatcatctatgccagcagatttacttataaaagaactagctaatgtcaacatactagtgaaacaaatatccacacccaagggaccttcactaagagtcatgataaactcaagaagtgcagtgctagcacaaatgcccagcaaatttaccatatgcgctaatgtgtccttggatgaaagaagcaaactagcatatgatgtaaccacaccctgtgaaatcaaggcatgtagtctaacatgcctaaaatcaaaaaatatgttgactacagttaaagatctcactatgaagacactcaaccctacacatgatattattgctttatgtgaatttgaaaacatagtaacatcaaaaaaagtcataataccaacatacctaagatccatcagtgtcagaaataaagatctgaacacacttgaaaatataacaaccactgaattcaaaaatgctatcacaaatgcaaaaatcatcccttactcaggattactattagtcatcacagtgactgacaacaaaggagcattcaaatacataaagccacaaagtcaattcatagtagatcttggagcttacctagaaaaagaaagtatatattatgttaccacaaattggaagcacacagctacacgatttgcaatcaaacccatggaagattaacctttttcctctacatcagtgtgttaattcatacaaactttctacctacattcttcacttcaccatcacaatcacaaacactctgtggttcaaccaatcaaacaaaacttatctgaagtcccagatcatcccaagtcattgtttatcagatctagtactcaaataagttaataaaaaatatacacatggacgtccatggggcaaatgcaaacatgtttgtttttcttgttttattgccactagtctctagtcagtgtgttaattttacaaacagaactcaattaccctctgcatacactaattctttcacacgtggtgtttattaccctgacaaagttttcagatcctcagttttacattcaactcaggacttgttcttacctttcttttccaatgttacttggttccatgctatacatgtctctgggaccaatggtactaagaggtttgataaccctgtcctaccatttaatgatggtgtttattttgcttccactgagaagtctaacataataagaggctggatttttggtactactttagattcgaagacccagtccctacttattgttaataacgctactaatgttgttattaaagtctgtgaatttcaattttgtaattatccatttttgggtgtttattaccacaaaaacaacaaaagttggatggaaagtgagttcagagtttattctagtgcgaataattgcacttttgaatatgtctctcagccttttcttatggaccttgaaggaaaacagggtaatttcaaaaatcttagtgaatttgtgtttaagaatattgatggttattttaaaatatattctaagcacacgcctattaatttagtgcgtgatctccctcagggtttttcggctttagaaccattggtagatttgccaataggtattaacatcactaggtttcaaactttacttgctttacatagaagttatttgactcctggtgattcttcttcaggttggacagctggtgctgcagcttattatgtgggttatcttcaacctaggacttttctattaaaatataatgaaaatggaaccattacagatgctgtagactgtgcacttgaccctctctcagaaacaaagtgtacgttgaaatccttcactgtagaaaaaggaatctatcaaacttctaactttagagtccaaccaacagaatctattgttagatttcctaatattacaaacttgtgcccttttggtgaagtttttaacgccaccagatttgcatctgtttatgcttggaacaggaagagaatcagcaactgtgttgctgattattctgtcctatataattccgcatcattttccacttttaagtgttatggagtgtctcctactaaattaaatgatctctgctttactaatgtctatgcagattcatttgtaattagaggtgatgaagtcagacaaatcgctccagggcaaactggaacgattgctgattataattataaattaccagatgattttacaggctgcgttatagcttggaattctaacaatcttgattctaaggttggtggtaattataattacctgtatagattgtttaggaagtctaatctcaaaccttttgagagagatatttcaactgaaatctatcaggccggtagcacaccttgtaatggtgttaaaggttttaattgttactttcctttacaatcatatggtttccaacccacttatggtgttggttaccaaccatacagagtagtagtactttcttttgaacttctacatgcaccagcaactgtttgtggacctaaaaagtctactaatttggttaaaaacaaatgtgtcaatttcaacttcaatggtttaacaggcacaggtgttcttactgagtctaacaaaaagtttctgcctttccaacaatttggcagagacattgctgacactactgatgctgtccgtgatccacagacacttgagattcttgacattacaccatgttcttttggtggtgtcagtgttataacaccaggaacaaatacttctaaccaggttgctgttctttatcagggtgttaactgcacagaagtccctgttgctattcatgcagatcaacttactcctacttggcgtgtttattctacaggttctaatgtttttcaaacacgtgcaggctgtttaataggggctgaatatgtcaacaactcatatgagtgtgacatacccattggtgcaggtatatgcgctagttatcagactcagactaattctcctcggcgggcacgtagtgtagctagtcaatccatcattgcctacactatgtcacttggtgcagaaaattcagttgcttactctaataactctattgccatacccacaaattttactattagtgttaccacagaaattctaccagtgtctatgaccaagacatcagtagattgtacaatgtacatttgtggtgattcaactgaatgcagcaatcttttgttgcaatatggcagtttttgtacacaattaaaccgtgctttaactggaatagctgttgaacaagacaaaaacacccaagaagtttttgcacaagtcaaacaaatttacaaaacaccaccaattaaagattttggtggttttaatttttcacaaatattaccagatccatcaaaaccaagcaagaggtcatttattgaagatctacttttcaacaaagtgacacttgcagatgctggcttcatcaaacaatatggtgattgccttggtgatattgctgctagagacctcatttgtgcacaaaagtttaacggccttactgttttgccacctttgctcacagatgaaatgattgctcaatacacttctgcactgttagcgggtacaatcacttctggttggacctttggtgcaggtgctgcattacaaataccatttgctatgcaaatggcttataggtttaatggtattggagttacacagaatgttctctatgagaaccaaaaattgattgccaaccaatttaatagtgctattggcaaaattcaagactcactttcttccacagcaagtgcacttggaaaacttcaagatgtggtcaaccaaaatgcacaagctttaaacacgcttgttaaacaacttagctccaattttggtgcaatttcaagtgttttaaatgatatcctttcacgtcttgacaaagttgaggctgaagtgcaaattgataggttgatcacaggcagacttcaaagtttgcagacatatgtgactcaacaattaattagagctgcagaaatcagagcttctgctaatcttgctgctattaaaatgtcagagtgtgtacttggacaatcaaaaagagttgatttttgtggaaagggctatcatcttatgtccttccctcagtcagcacctcatggtgtagtcttcttgcatgtgacttatgtccctgcacaagaaaagaacttcacaactgctcctgccatttgtcatgatggaaaagcacactttcctcgtgaaggtgtctttgtttcaaatggcacacactggtttgtaacacaaaggaatttttatgaaccacaaatcattactacagacaacacatttgtgtctggtaactgtgatgttgtaataggaattgtcaacaacacagtttatgatcctttgcaacctgaattagactcattcaaggaggagttagataaatattttaagaatcatacatcaccagatgttgatttaggtgacatctctggcattaatgcttcatttgtaaacattcaaaaagaaattgaccgcctcaatgaggttgccaagaatttaaatgaatctctcatcgatctccaagaacttggaaagtatgagcagtatataaaatggccatggtacatttggctaggttttatagctggcttgattgccatagtaatggtgacaattatgctttgctgtatgaccagttgctgtagttgtctcaagggctgttgttcttgtggatcctgctgcaaatttgatgaagacgacggactgctcctatactgtaaggccagaagcacaccaatcacactaagcaaggatcaactgagtggtataaataatattgcatttagtaactaaataaaaatagcacctaatcatgttcttacaatggtttactatctgctcatagacaacccatctatcattggattttcttaaaatctgaacttcatcgaaactcttatctataaaccatctcacttacactatttaagtagattcctagtttatagttatataaaacacaattgaatgccagtcgaccttaccatctgtaaaaatgaaaactggggcaaatatgtcacgaaggaatccttgcaaatttgaaattcgaggtcattgcttaaatggtaagaggtgtcattttagtcataattattttgaatggccaccccatgcactgcttgtaagacaaaactttatgttaaacagaatacttaagtctatggataaaagtatagataccttatcagaaataagtggagctgcagagttggacagaacagaagagtatgctcttggtgtagttggagtgctagagagttatataggatcaataaacaatataactaaacaatcagcatgtgttgccatgagcaaactcctcactgaactcaatagtgatgatatcaaaaagctgagggacaatgaagagctaaattcacccaagataagagtgtacaatactgtcatatcatatattgaaagcaacaggaaaaacaataaacaaactatccatctgttaaaaagattgccagcagacgtattgaagaaaaccatcaaaaacacattggatatccataagagcataaccatcaacaacccaaaagaatcaactgttagtgatacaaatgaccatgccaaaaataatgatactacctgacaaatatccttgtagtataacttccatactaataacaagtagatgtagagttactatgtataatcaaaagaacacactatatttcaatcaaaacaacccaaataaccatatgtactcaccgaatcaaacattcaatgaaatccattggacctctcaagaattgattgacacaattcaaaattttctacaacatctaggtattattgaggatatatatacaatatatatattagtgtcataacactcaattctaacactcaccacatcgttacattattaattcaaacaattcaagttgtgggacaaaatggatcccattattaatggaaattctgctaatgtttatctaaccgatagttatttaaaaggtgttatctctttctcagagtgtaatgctttaggaagttacatattcaatggtccttatctcaaaaatgattataccaacttaattagtagacaaaatccattaatagaacacatgaatctaaagaaactaaatataacacagtccttaatatctaagtatcataaaggtgaaataaaattagaagaacctacttattttcagtcattacttatgacatacaagagtatgacctcgtcagaacagattgctaccactaatttacttaaaaagataataagaagagctatagaaataagtgatgtcaaagtctatgctatattgaataaactagggcttaaagaaaaggacaagattaaatccaacaatggacaagatgaagacaactcagttattacgaccataatcaaagatgatatactttcagctgttaaagataatcaatctcatcttaaagcagacaaaaatcactctacaaaacaaaaagacacaatcaaaacaacactcttgaagaaattgatgtgttcaatgcaacatcctccatcatggttaatacattggtttaacttatacacaaaattaaacaacatattaacacagtatcgatcaaatgaggtaaaaaaccatgggtttacattgatagataatcaaactcttagtggatttcaatttattttgaaccaatatggttgtatagtttatcataaggaactcaaaagaattactgtgacaacctataatcaattcttgacatggaaagatattagccttagtagattaaatgtttgtttaattacatggattagtaactgcttgaacacattaaataaaagcttaggcttaagatgcggattcaataatgttatcttgacacaactattcctttatggagattgtatactaaagctatttcacaatgaggggttctacataataaaagaggtagagggatttattatgtctctaattttaaatataacagaagaagatcaattcagaaaacgattttataatagtatgctcaacaacatcacagatgctgctaataaagctcagaaaaatctgctatcaagagtatgtcatacattattagataagacagtgtccgataatataataaatggcagatggataattctattaagtaagttccttaaattaattaagcttgcaggtgacaataaccttaacaatctgagtgaactatattttttgttcagaatatttggacacccaatggtagatgaaagacaagccatggatgctgttaaaattaattgcaatgagaccaaattttacttgttaagcagtctgagtatgttaagaggtgcctttatatatagaattataaaagggtttgtaaataattacaacagatggcctactttaagaaatgctattgttttacccttaagatggttaacttactataaactaaacacttatccttctttgttggaacttacagaaagagatttgattgtgttatcaggactacgtttctatcgtgagtttcggttgcctaaaaaagtggatcttgaaatgattataaatgataaagctatatcacctcctaaaaatttgatatggactagtttccctagaaattacatgccatcacacatacaaaactatatagaacatgaaaaattaaaattttccgagagtgataaatcaagaagagtattagagtattatttaagagataacaaattcaatgaatgtgatttatacaactgtgtagttaatcaaagttatctcaacaaccctaatcatgtggtatcattgacaggcaaagaaagagaactcagtgtaggtagaatgtttgcaatgcaaccgggaatgttcagacaggttcaaatattggcagagaaaatgatagctgaaaacattttacaattctttcctgaaagtcttacaagatatggtgatctagaactacaaaaaatattagaattgaaagcaggaataagtaacaaatcaaatcgctacaatgataattacaacaattacattagtaagtgctctatcatcacagatctcagcaaattcaatcaagcatttcgatatgaaacgtcatgtatttgtagtgatgtgctggatgaactgcatggtgtacaatctctattttcctggttacatttaactattcctcatgtcacaataatatgcacatataggcatgcacccccctatataggagatcatattgtagatcttaacaatgtagatgaacaaagtggattatatagatatcacatgggtggcatcgaagggtggtgtcaaaaactgtggaccatagaagctatatcactattggatctaatatctctcaaagggaaattctcaattactgctttaattaatggtgacaatcaatcaatagatataagcaaaccaatcagactcatggaaggtcaaactcatgctcaagcagattatttgctagcattaaatagccttaaattactgtataaagagtatgcaggcataggccacaaattaaaaggaactgagacttatatatcacgagatatgcaatttatgagtaaaacaattcaacataacggtgtatattacccagctagtataaagaaagtcctaagagtgggaccgtggataaacactatacttgatgatttcaaagtgagtctagaatctataggtagtttgacacaagaattagaatatagaggtgaaagtctattatgcagtttaatatttagaaatgtatggttatataatcagattgctctacaattaaaaaatcatgcattatgtaacaataaactatatttggacatattaaaggttctgaaacacttaaaaaccttttttaatcttgataatattgatacagcattaacattgtatatgaatttacccatgttatttggtggtggtgatcccaacttgttatatcgaagtttctatagaagaactcctgacttcctcacagaggctatagttcactctgtgttcatacttagttattatacaaaccatgacttaaaagataaacttcaagatctgtcagatgatagattgaataagttcttaacatgcataatcacgtttgacaaaaaccctaatgctgaattcgtaacattgatgagagatcctcaagctttagggtctgagagacaagctaaaattactagcgaaatcaatagactggcagttacagaggttttgagtacagctccaaacaaaatattctccaaaagtgcacaacattatactactacagagatagatctaaatgatattatgcaaaatatagaacctacatatcctcatgggctaagagttgtttatgaaagtttacccttttataaagcagagaaaatagtaaatcttatatcaggtacaaaatctataactaacatactggaaaaaacttctgccatagacttaacagatattgatagagccactgagatgatgaggaaaaacataactttgcttataaggatacttccattggattgtaacagagataaaagagagatattgagtatggaaaacctaagtattactgaattaagcaaatatgttagggaaagatcttggtctttatccaatatagttggtgttacatcacccagtatcatgtatacaatggacatcaaatatactacaagcactatatctagtggcataattatagagaaatataatgttaacagtttaacacgtggtgagagaggacccactaaaccatgggttggttcatctacacaagagaaaaaaacaatgccagtttataatagacaagtcttaaccaaaaaacagagagatcaaatagatctattagcaaaattggattgggtgtatgcatctatagataacaaggatgaattcatggaagaactcagcataggaacccttgggttaacatatgaaaaggccaagaaattatttccacaatatttaagtgtcaattatttgcatcgccttacagtcagtagtagaccatgtgaattccctgcatcaataccagcttatagaacaacaaattatcactttgacactagccctattaatcgcatattaacagaaaagtatggtgatgaagatattgacatagtattccaaaactgtataagctttggccttagtttaatgtcagtagtagaacaatttactaatgtatgtcctaacagaattattctcatacctaagcttaatgagatacatttgatgaaacctcccatattcacaggtgatgttgatattcacaagttaaaacaagtgatacaaaaacagcatatgtttttaccagacaaaataagtttgactcaatatgtggaattattcttaagtaataaaacactcaaatctggatctcatgttaattctaatttaatattggcacataaaatatctgactattttcataatacttacattttaagtactaatttagctggacattggattctgattatacaacttatgaaagattctaaaggtatttttgaaaaagattggggagagggatatataactgatcatatgtttattaatttgaaagttttcttcaatgcttataagacctatctcttgtgttttcataaaggttatggcaaagcaaagctggagtgtgatatgaacacttcagatcttctatgtgtattggaattaatagacagtagttattggaagtctatgtctaaggtatttttagaacaaaaagttatcaaatacattcttagccaagatgcaagtttacatagagtaaaaggatgtcatagcttcaaattatggtttcttaaacgtcttaatgtagcagaattcacagtttgcccttgggttgttaacatagattatcatccaacacatatgaaagcaatattaacttatatagatcttgttagaatgggattgataaatatagatagaatacacattaaaaataaacacaaattcaatgatgaattttatacttctaatctcttctacattaattataacttctcagataatactcatctattaactaaacatataaggattgctaattctgaattagaaaataattacaacaaattatatcatcctacaccagaaaccctagagaatatactagccaatccgattaaaagtaatgacaaaaagacactgaatgactattgtataggtaaaaatgttgactcaataatgttaccattgttatctaataagaagcttattaaatcgtctgcaatgattagaaccaattacagcaaacaagatttgtataatttattccctatggttgtgattgatagaattatagatcattcaggcaatacagccaaatccaaccaactttacactactacttcccaccaaatatctttagtgcacaatagcacatcactttactgcatgcttccttggcatcatattaatagattcaattttgtatttagttctacaggttgtaaaattagtatagagtatattttaaaagatcttaaaattaaagatcccaattgtatagcattcataggtgaaggagcagggaatttattattgcgtacagtagtggaacttcatcctgacataagatatatttacagaagtctgaaagattgcaatgatcatagtttacctattgagtttttaaggctgtacaatggacatatcaacattgattatggtgaaaatttgaccattcctgctacagatgcaaccaacaacattcattggtcttatttacatataaagtttgctgaacctatcagtctttttgtctgtgatgccgaattgtctgtaacagtcaactggagtaaaattataatagaatggagcaagcatgtaagaaagtgcaagtactgttcctcagttaataaatgtatgttaatagtaaaatatcatgctcaagatgatattgatttcaaattagacaatataactatattaaaaacttatgtatgcttaggcagtaagttaaagggatcggaggtttacttagtccttacaataggtcctgcgaatatattcccagtatttaatgtagtacaaaatgctaaattgatactatcaagaaccaaaaatttcatcatgcctaagaaagctgataaagagtctattgatgcaaatattaaaagtttgataccctttctttgttaccctataacaaaaaaaggaattaatactgcattgtcaaaactaaagagtgttgttagtggagatatactatcatattctatagctggacgtaatgaagttttcagcaataaacttataaatcataagcatatgaacatcttaaaatggttcaatcatgttttaaatttcagatcaacagaactaaactataaccatttatatatggtagaatctacatatccttacctaagtgaattgttaaacagcttgacaaccaatgaacttaaaaaactgattaaaatcacaggtagtctgttatacaactttcataatgaataatgaataaagatcttataataaaaattcccatagctatacactaacactgtattcaattatagttattaaaaattaaaaatcgtacgattttttaaataacttttagtgaactaatcctaaagttatcattttaatcttggaggaataaatttaaaccctaatctaattggtttatatgtgtattaactaaattacgagatattagtttttgacactttttttctcgt

SEQ ID NO: 84 - DNA, 23452 bp, Artificial Sequence
  Description of Artificial Sequence: Synthetic polynucleotide
aaacggatccttcgaaacgaaattaatacgactcactatagggaagtttttcgcgtctgatgaggccgttaggccgaaactcctctccggagtcacgcgaaaaaatgcgtacaacaaacttgcataaaccaaaaaaatggggcaaataagaatttgataagtaccacttaaatttaactcccttgcttagcgatggtgagcgagctgattaaggagaacatgcacatgaagctgtacatggagggcaccgtgaacaaccaccacttcaagtgcacatccgagggcgaaggcaagccctacgagggcacccagaccatgagaatcaaggcggtcgagggcggccctctccccttcgccttcgacatcctggctaccagcttcatgtacggcagcaaaaccttcatcaaccacacccagggcatccccgacttctttaagcagtccttccccgagggcttcacatgggagagagtcaccacatacgaagacgggggcgtgctgaccgctacccaggacaccagcctccaggacggctgcctcatctacaacgtcaagatcagaggggtgaacttcccatccaacggccctgtgatgcagaagaaaacactcggctgggaggcctccaccgagaccctgtaccccgctgacggcggcctggaaggcagagccgacatggccctgaagctcgtgggcgggggccacctgatctgcaacttgaagaccacatacagatccaagaaacccgctaagaacctcaagatgcccggcgtctactatgtggacagaagactggaaagaatcaaggaggccgacaaagagacctacgtcgagcagcacgaggtggctgtggccagatactgcgacctccctagcaaactggggcacagatgagtattcaattatagttattaaaaacttaacagaagacaaaaatggggcaaataagaatttgataagtaccacttaaatttaactcccttgcttagcgatgggttcgaattcgctatcgatgataaaagtacgtctacaaaatctatttgataatgatgaagtagcgctactaaaaataacgtgttatacggataaactaatacatctaacgaatgcgctagcgaaagcggtaatacatacgataaaactaaatggtatagtatttgtacatgtaataacgtcgtcggatatatgtccgaataataatatagtagtaaaatcgaattttacgacgatgccggtactacaaaatggtggttatatatgggaaatgatggaactaacgcattgttcgcaaccgaatggtctactagatgataattgtgaaataaaattttcgaaaaaactatcggattcgacgatgacgaattatatgaatcaactatcggaactactaggttttgatctaaatccgtaaattataattaatatcaactagcaaatcaatgtcactaacaccattagttaatataaaacttaacagaagacaaaaatggggcaaataaatcaattcagccaacccaaccatggatacgacgcataatgataatacgccgcaacgtctaatgataacggatatgcgtccgctatcgctagaaacgataataacgtcgctaacgcgtgatataataacgcataaatttatatatctaataaatcatgaatgtatagtacgtaaactagatgaacgtcaagcgacgtttacgtttctagtaaattatgaaatgaaactactacataaagtaggttcgacgaaatataaaaaatatacggaatataatacgaaatatggtacgtttccgatgccgatatttataaatcatgatggttttctagaatgtataggtataaaaccgacgaaacatacgccgataatatataaatatgatctaaatccgtaaatttcaacacaatattcacacaatctaaaacaacaactctatgcataactatactccatagtccagatggagcctgaaaattatagtaatttaaaattaaggagagatataagatagaagatggggcaaatacaaagatggctcttagcaaagtcaagttgaatgatacactcaacaaagatcaacttctgtcatccagcaaatacaccatccaacggagcacaggagatagtattgatactcctaattatgatgtgcagaaacacatcaataagttatgtggcatgttattaatcacagaagatgctaatcataaattcactgggttaataggtatgttatatgcgatgtctaggttaggaagagaagacaccataaaaatactcagagatgcgggatatcatgtaaaagcaaatggagtagatgtaacaacacatcgtcaagacattaatggaaaagaaatgaaatttgaagtgttaacattggcaagcttaacaactgaaattcaaatcaacattgagatagaatctagaaaatcctacaaaaaaatgctaaaagaaatgggagaggtagctccagaatacaggcatgactctcctgattgtgggatgataatattatgtatagcagcattagtaataactaaattagcagcaggggacagatctggtcttacagccgtgattaggagagctaataatgtcctaaaaaatgaaatgaaacgttacaaaggcttactacccaaggacatagccaacagcttctatgaagtgtttgaaaaacatccccactttatagatgtttttgttcattttggtatagcacaatcttctaccagaggtggcagtagagttgaagggatttttgcaggattgtttatgaatgcctatggtgcagggcaagtgatgttacggtggggagtcttagcaaaatcagttaaaaatattatgttaggacatgctagtgtgcaagcagaaatggaacaagttgttgaggtttatgaatatgcccaaaaattgggtggtgaagcaggattctaccatatattgaacaacccaaaagcatcattattatctttgactcaatttcctcacttctccagtgtagtattaggcaatgctgctggcctaggcataatgggagagtacagaggtacaccgaggaatcaagatctatatgatgcagcaaaggcatatgctgaacaactcaaagaaaatggtgtgattaactacagtgtactagacttgacagcagaagaactagaggctatcaaacatcagcttaatccaaaagataatgatgtagagctttgagttaataaaaaatggggcaaataaatcatcatggaaaagtttgctcctgaattccatggagaagatgcaaacaacagggctactaaattcctagaatcaataaagggcaaattcacatcacccaaagatcccaagaaaaaagatagtatcatatctgtcaactcaatagatatagaagtaaccaaagaaagccctataacatcaaattcaactattatcaacccaacaaatgagacagatgatactgcagggaacaagcccaattatcaaagaaaacctctagtaagtttcaaagaagaccctacaccaagtgataatcccttttctaaactatacaaagaaaccatagaaacatttgataacaatgaagaagaatccagctattcatacgaagaaataaatgatcagacaaacgataatataacagcaagattagataggattgatgaaaaattaagtgaaatactaggaatgcttcacacattagtagtggcaagtgcaggacctacatctgctcgggatggtataagagatgccatgattggtttaagagaagaaatgatagaaaaaatcagaactgaagcattaatgaccaatgacagattagaagctatggcaagactcaggaatgaggaaagtgaaaagatggcaaaagacacatcagatgaagtgtctctcaatccaacatcagagaaattgaacaacctattggaagggaatgatagtgacaatgatctatcacttgaagatttctgattagttaccactcttcacatcaacacacaataccaacagaagaccaacaaactaaccaacccaatcatccaaccaaacatccatccgccaatcagccaaacagccaacaaaacaaccagccaatccaaaactaaccacccggaaaaaatctataatatagttacaaaaaaaggaaagggtggggcaaatatggaaacatacgtgaacaagcttcacgaaggctccacatacacagctgctgttcaatacaatgtcttagaaaaagacgatgaccctgcatcacttacaatatgggtgcccatgttccaatcatctatgccagcagatttacttataaaagaactagctaatgtcaacatactagtgaaacaaatatccacacccaagggaccttcactaagagtcatgataaactcaagaagtgcagtgctagcacaaatgcccagcaaatttaccatatgcgctaatgtgtccttggatgaaagaagcaaactagcatatgatgtaaccacaccctgtgaaatcaaggcatgtagtctaacatgcctaaaatcaaaaaatatgttgactacagttaaagatctcactatgaagacactcaaccctacacatgatattattgctttatgtgaatttgaaaacatagtaacatcaaaaaaagtcataataccaacatacctaagatccatcagtgtcagaaataaagatctgaacacacttgaaaatataacaaccactgaattcaaaaatgctatcacaaatgcaaaaatcatcccttactcaggattactattagtcatcacagtgactgacaacaaaggagcattcaaatacataaagccacaaagtcaattcatagtagatcttggagcttacctagaaaaagaaagtatatattatgttaccacaaattggaagcacacagctacacgatttgcaatcaaacccatggaagattaacctttttcctctacatcagtgtgttaattcatacaaactttctacctacattcttcacttcaccatcacaatcacaaacactctgtggttcaaccaatcaaacaaaacttatctgaagtcccagatcatcccaagtcattgtttatcagatctagtactcaaataagttaataaaaaatatacacatggacgtccatggggcaaatgcaaacatgtttgtttttcttgttttattgccactagtctctagtcagtgtgttaattttacaaacagaactcaattaccctctgcatacactaattctttcacacgtggtgtttattaccctgacaaagttttcagatcctcagttttacattcaactcaggacttgttcttacctttcttttccaatgttacttggttccatgctatacatgtctctgggaccaatggtactaagaggtttgataaccctgtcctaccatttaatgatggtgtttattttgcttccactgagaagtctaacataataagaggctggatttttggtactactttagattcgaagacccagtccctacttattgttaataacgctactaatgttgttattaaagtctgtgaatttcaattttgtaattatccatttttgggtgtttattaccacaaaaacaacaaaagttggatggaaagtgagttcagagtttattctagtgcgaataattgcacttttgaatatgtctctcagccttttcttatggaccttgaaggaaaacagggtaatttcaaaaatcttagtgaatttgtgtttaagaatattgatggttattttaaaatatattctaagcacacgcctattaatttagtgcgtgatctccctcagggtttttcggctttagaaccattggtagatttgccaataggtattaacatcactaggtttcaaactttacttgctttacatagaagttatttgactcctggtgattcttcttcaggttggacagctggtgctgcagcttattatgtgggttatcttcaacctaggacttttctattaaaatataatgaaaatggaaccattacagatgctgtagactgtgcacttgaccctctctcagaaacaaagtgtacgttgaaatccttcactgtagaaaaaggaatctatcaaacttctaactttagagtccaaccaacagaatctattgttagatttcctaatattacaaacttgtgcccttttggtgaagtttttaacgccaccagatttgcatctgtttatgcttggaacaggaagagaatcagcaactgtgttgctgattattctgtcctatataattccgcatcattttccacttttaagtgttatggagtgtctcctactaaattaaatgatctctgctttactaatgtctatgcagattcatttgtaattagaggtgatgaagtcagacaaatcgctccagggcaaactggaacgattgctgattataattataaattaccagatgattttacaggctgcgttatagcttggaattctaacaatcttgattctaaggttggtggtaattataattacctgtatagattgtttaggaagtctaatctcaaaccttttgagagagatatttcaactgaaatctatcaggccggtagcacaccttgtaatggtgttaaaggttttaattgttactttcctttacaatcatatggtttccaacccacttatggtgttggttaccaaccatacagagtagtagtactttcttttgaacttctacatgcaccagcaactgtttgtggacctaaaaagtctactaatttggttaaaaacaaatgtgtcaatttcaacttcaatggtttaacaggcacaggtgttcttactgagtctaacaaaaagtttctgcctttccaacaatttggcagagacattgctgacactactgatgctgtccgtgatccacagacacttgagattcttgacattacaccatgttcttttggtggtgtcagtgttataacaccaggaacaaatacttctaaccaggttgctgttctttatcagggtgttaactgcacagaagtccctgttgctattcatgcagatcaacttactcctacttggcgtgtttattctacaggttctaatgtttttcaaacacgtgcaggctgtttaataggggctgaatatgtcaacaactcatatgagtgtgacatacccattggtgcaggtatatgcgctagttatcagactcagactaattctcctcggcgggcacgtagtgtagctagtcaatccatcattgcctacactatgtcacttggtgcagaaaattcagttgcttactctaataactctattgccatacccacaaattttactattagtgttaccacagaaattctaccagtgtctatgaccaagacatcagtagattgtacaatgtacatttgtggtgattcaactgaatgcagcaatcttttgttgcaatatggcagtttttgtacacaattaaaccgtgctttaactggaatagctgttgaacaagacaaaaacacccaagaagtttttgcacaagtcaaacaaatttacaaaacaccaccaattaaagattttggtggttttaatttttcacaaatattaccagatccatcaaaaccaagcaagaggtcatttattgaagatctacttttcaacaaagtgacacttgcagatgctggcttcatcaaacaatatggtgattgccttggtgatattgctgctagagacctcatttgtgcacaaaagtttaacggccttactgttttgccacctttgctcacagatgaaatgattgctcaatacacttctgcactgttagcgggtacaatcacttctggttggacctttggtgcaggtgctgcattacaaataccatttgctatgcaaatggcttataggtttaatggtattggagttacacagaatgttctctatgagaaccaaaaattgattgccaaccaatttaatagtgctattggcaaaattcaagactcactttcttccacagcaagtgcacttggaaaacttcaagatgtggtcaaccaaaatgcacaagctttaaacacgcttgttaaacaacttagctccaattttggtgcaatttcaagtgttttaaatgatatcctttcacgtcttgacaaagttgaggctgaagtgcaaattgataggttgatcacaggcagacttcaaagtttgcagacatatgtgactcaacaattaattagagctgcagaaatcagagcttctgctaatcttgctgctattaaaatgtcagagtgtgtacttggacaatcaaaaagagttgatttttgtggaaagggctatcatcttatgtccttccctcagtcagcacctcatggtgtagtcttcttgcatgtgacttatgtccctgcacaagaaaagaacttcacaactgctcctgccatttgtcatgatggaaaagcacactttcctcgtgaaggtgtctttgtttcaaatggcacacactggtttgtaacacaaaggaatttttatgaaccacaaatcattactacagacaacacatttgtgtctggtaactgtgatgttgtaataggaattgtcaacaacacagtttatgatcctttgcaacctgaattagactcattcaaggaggagttagataaatattttaagaatcatacatcaccagatgttgatttaggtgacatctctggcattaatgcttcatttgtaaacattcaaaaagaaattgaccgcctcaatgaggttgccaagaatttaaatgaatctctcatcgatctccaagaacttggaaagtatgagcagtatataaaatggccatggtacatttggctaggttttatagctggcttgattgccatagtaatggtgacaattatgctttgctgtatgaccagttgctgtagttgtctcaagggctgttgttcttgtggatcctgctgcaaatttgatgaagacgacggactgctcctatactgtaaggccagaagcacaccaatcacactaagcaaggatcaactgagtggtataaataatattgcatttagtaactaaataaaaatagcacctaatcatgttcttacaatggtttactatctgctcatagacaacccatctatcattggattttcttaaaatctgaacttcatcgaaactcttatctataaaccatctcacttacactatttaagtagattcctagtttatagttatataaaacacaattgaatgccagtcgaccttaccatctgtaaaaatgaaaactggggcaaatatgtcacgaaggaatccttgcaaatttgaaattcgaggtcattgcttaaatggtaagaggtgtcattttagtcataattattttgaatggccaccccatgcactgcttgtaagacaaaactttatgttaaacagaatacttaagtctatggataaaagtatagataccttatcagaaataagtggagctgcagagttggacagaacagaagagtatgctcttggtgtagttggagtgctagagagttatataggatcaataaacaatataactaaacaatcagcatgtgttgccatgagcaaactcctcactgaactcaatagtgatgatatcaaaaagctgagggacaatgaagagctaaattcacccaagataagagtgtacaatactgtcatatcatatattgaaagcaacaggaaaaacaataaacaaactatccatctgttaaaaagattgccagcagacgtattgaagaaaaccatcaaaaacacattggatatccataagagcataaccatcaacaacccaaaagaatcaactgttagtgatacaaatgaccatgccaaaaataatgatactacctgacaaatatccttgtagtataacttccatactaataacaagtagatgtagagttactatgtataatcaaaagaacacactatatttcaatcaaaacaacccaaataaccatatgtactcaccgaatcaaacattcaatgaaatccattggacctctcaagaattgattgacacaattcaaaattttctacaacatctaggtattattgaggatatatatacaatatatatattagtgtcataacactcaattctaacactcaccacatcgttacattattaattcaaacaattcaagttgtgggacaaaatggatcccattattaatggaaattctgctaatgtttatctaaccgatagttatttaaaaggtgttatctctttctcagagtgtaatgctttaggaagttacatattcaatggtccttatctcaaaaatgattataccaacttaattagtagacaaaatccattaatagaacacatgaatctaaagaaactaaatataacacagtccttaatatctaagtatcataaaggtgaaataaaattagaagaacctacttattttcagtcattacttatgacatacaagagtatgacctcgtcagaacagattgctaccactaatttacttaaaaagataataagaagagctatagaaataagtgatgtcaaagtctatgctatattgaataaactagggcttaaagaaaaggacaagattaaatccaacaatggacaagatgaagacaactcagttattacgaccataatcaaagatgatatactttcagctgttaaagataatcaatctcatcttaaagcagacaaaaatcactctacaaaacaaaaagacacaatcaaaacaacactcttgaagaaattgatgtgttcaatgcaacatcctccatcatggttaatacattggtttaacttatacacaaaattaaacaacatattaacacagtatcgatcaaatgaggtaaaaaaccatgggtttacattgatagataatcaaactcttagtggatttcaatttattttgaaccaatatggttgtatagtttatcataaggaactcaaaagaattactgtgacaacctataatcaattcttgacatggaaagatattagccttagtagattaaatgtttgtttaattacatggattagtaactgcttgaacacattaaataaaagcttaggcttaagatgcggattcaataatgttatcttgacacaactattcctttatggagattgtatactaaagctatttcacaatgaggggttctacataataaaagaggtagagggatttattatgtctctaattttaaatataacagaagaagatcaattcagaaaacgattttataatagtatgctcaacaacatcacagatgctgctaataaagctcagaaaaatctgctatcaagagtatgtcatacattattagataagacagtgtccgataatataataaatggcagatggataattctattaagtaagttccttaaattaattaagcttgcaggtgacaataaccttaacaatctgagtgaactatattttttgttcagaatatttggacacccaatggtagatgaaagacaagccatggatgctgttaaaattaattgcaatgagaccaaattttacttgttaagcagtctgagtatgttaagaggtgcctttatatatagaattataaaagggtttgtaaataattacaacagatggcctactttaagaaatgctattgttttacccttaagatggttaacttactataaactaaacacttatccttctttgttggaacttacagaaagagatttgattgtgttatcaggactacgtttctatcgtgagtttcggttgcctaaaaaagtggatcttgaaatgattataaatgataaagctatatcacctcctaaaaatttgatatggactagtttccctagaaattacatgccatcacacatacaaaactatatagaacatgaaaaattaaaattttccgagagtgataaatcaagaagagtattagagtattatttaagagataacaaattcaatgaatgtgatttatacaactgtgtagttaatcaaagttatctcaacaaccctaatcatgtggtatcattgacaggcaaagaaagagaactcagtgtaggtagaatgtttgcaatgcaaccgggaatgttcagacaggttcaaatattggcagagaaaatgatagctgaaaacattttacaattctttcctgaaagtcttacaagatatggtgatctagaactacaaaaaatattagaattgaaagcaggaataagtaacaaatcaaatcgctacaatgataattacaacaattacattagtaagtgctctatcatcacagatctcagcaaattcaatcaagcatttcgatatgaaacgtcatgtatttgtagtgatgtgctggatgaactgcatggtgtacaatctctattttcctggttacatttaactattcctcatgtcacaataatatgcacatataggcatgcacccccctatataggagatcatattgtagatcttaacaatgtagatgaacaaagtggattatatagatatcacatgggtggcatcgaagggtggtgtcaaaaactgtggaccatagaagctatatcactattggatctaatatctctcaaagggaaattctcaattactgctttaattaatggtgacaatcaatcaatagatataagcaaaccaatcagactcatggaaggtcaaactcatgctcaagcagattatttgctagcattaaatagccttaaattactgtataaagagtatgcaggcataggccacaaattaaaaggaactgagacttatatatcacgagatatgcaatttatgagtaaaacaattcaacataacggtgtatattacccagctagtataaagaaagtcctaagagtgggaccgtggataaacactatacttgatgatttcaaagtgagtctagaatctataggtagtttgacacaagaattagaatatagaggtgaaagtctattatgcagtttaatatttagaaatgtatggttatataatcagattgctctacaattaaaaaatcatgcattatgtaacaataaactatatttggacatattaaaggttctgaaacacttaaaaaccttttttaatcttgataatattgatacagcattaacattgtatatgaatttacccatgttatttggtggtggtgatcccaacttgttatatcgaagtttctatagaagaactcctgacttcctcacagaggctatagttcactctgtgttcatacttagttattatacaaaccatgacttaaaagataaacttcaagatctgtcagatgatagattgaataagttcttaacatgcataatcacgtttgacaaaaaccctaatgctgaattcgtaacattgatgagagatcctcaagctttagggtctgagagacaagctaaaattactagcgaaatcaatagactggcagttacagaggttttgagtacagctccaaacaaaatattctccaaaagtgcacaacattatactactacagagatagatctaaatgatattatgcaaaatatagaacctacatatcctcatgggctaagagttgtttatgaaagtttacccttttataaagcagagaaaatagtaaatcttatatcaggtacaaaatctataactaacatactggaaaaaacttctgccatagacttaacagatattgatagagccactgagatgatgaggaaaaacataactttgcttataaggatacttccattggattgtaacagagataaaagagagatattgagtatggaaaacctaagtattactgaattaagcaaatatgttagggaaagatcttggtctttatccaatatagttggtgttacatcacccagtatcatgtatacaatggacatcaaatatactacaagcactatatctagtggcataattatagagaaatataatgttaacagtttaacacgtggtgagagaggacccactaaaccatgggttggttcatctacacaagagaaaaaaacaatgccagtttataatagacaagtcttaaccaaaaaacagagagatcaaatagatctattagcaaaattggattgggtgtatgcatctatagataacaaggatgaattcatggaagaactcagcataggaacccttgggttaacatatgaaaaggccaagaaattatttccacaatatttaagtgtcaattatttgcatcgccttacagtcagtagtagaccatgtgaattccctgcatcaataccagcttatagaacaacaaattatcactttgacactagccctattaatcgcatattaacagaaaagtatggtgatgaagatattgacatagtattccaaaactgtataagctttggccttagtttaatgtcagtagtagaacaatttactaatgtatgtcctaacagaattattctcatacctaagcttaatgagatacatttgatgaaacctcccatattcacaggtgatgttgatattcacaagttaaaacaagtgatacaaaaacagcatatgtttttaccagacaaaataagtttgactcaatatgtggaattattcttaagtaataaaacactcaaatctggatctcatgttaattctaatttaatattggcacataaaatatctgactattttcataatacttacattttaagtactaatttagctggacattggattctgattatacaacttatgaaagattctaaaggtatttttgaaaaagattggggagagggatatataactgatcatatgtttattaatttgaaagttttcttcaatgcttataagacctatctcttgtgttttcataaaggttatggcaaagcaaagctggagtgtgatatgaacacttcagatcttctatgtgtattggaattaatagacagtagttattggaagtctatgtctaaggtatttttagaacaaaaagttatcaaatacattcttagccaagatgcaagtttacatagagtaaaaggatgtcatagcttcaaattatggtttcttaaacgtcttaatgtagcagaattcacagtttgcccttgggttgttaacatagattatcatccaacacatatgaaagcaatattaacttatatagatcttgttagaatgggattgataaatatagatagaatacacattaaaaataaacacaaattcaatgatgaattttatacttctaatctcttctacattaattataacttctcagataatactcatctattaactaaacatataaggattgctaattctgaattagaaaataattacaacaaattatatcatcctacaccagaaaccctagagaatatactagccaatccgattaaaagtaatgacaaaaagacactgaatgactattgtataggtaaaaatgttgactcaataatgttaccattgttatctaataagaagcttattaaatcgtctgcaatgattagaaccaattacagcaaacaagatttgtataatttattccctatggttgtgattgatagaattatagatcattcaggcaatacagccaaatccaaccaactttacactactacttcccaccaaatatctttagtgcacaatagcacatcactttactgcatgcttccttggcatcatattaatagattcaattttgtatttagttctacaggttgtaaaattagtatagagtatattttaaaagatcttaaaattaaagatcccaattgtatagcattcataggtgaaggagcagggaatttattattgcgtacagtagtggaacttcatcctgacataagatatatttacagaagtctgaaagattgcaatgatcatagtttacctattgagtttttaaggctgtacaatggacatatcaacattgattatggtgaaaatttgaccattcctgctacagatgcaaccaacaacattcattggtcttatttacatataaagtttgctgaacctatcagtctttttgtctgtgatgccgaattgtctgtaacagtcaactggagtaaaattataatagaatggagcaagcatgtaagaaagtgcaagtactgttcctcagttaataaatgtatgttaatagtaaaatatcatgctcaagatgatattgatttcaaattagacaatataactatattaaaaacttatgtatgcttaggcagtaagttaaagggatcggaggtttacttagtccttacaataggtcctgcgaatatattcccagtatttaatgtagtacaaaatgctaaattgatactatcaagaaccaaaaatttcatcatgcctaagaaagctgataaagagtctattgatgcaaatattaaaagtttgataccctttctttgttaccctataacaaaaaaaggaattaatactgcattgtcaaaactaaagagtgttgttagtggagatatactatcatattctatagctggacgtaatgaagttttcagcaataaacttataaatcataagcatatgaacatcttaaaatggttcaatcatgttttaaatttcagatcaacagaactaaactataaccatttatatatggtagaatctacatatccttacctaagtgaattgttaaacagcttgacaaccaatgaacttaaaaaactgattaaaatcacaggtagtctgttatacaactttcataatgaataatgaataaagatcttataataaaaattcccatagctatacactaacactgtattcaattatagttattaaaaattaaaaatcgtacgattttttaaataacttttagtgaactaatcctaaagttatcattttaatcttggaggaataaatttaaaccctaatctaattggtttatatgtgtattaactaaattacgagatattagtttttgacactttttttctcgtgggtcggcatggcatctccacctcctcgcggtccgacctgggcatccgaaggaggacgcacgtccactcggatggctaagggagctgctaacaaagcccgaaaggaagctgagttggctgctgccaccgctgagcaataactagcataaccccttggggcctctaaacgggtcttgaggggttttttgctgaaaggaggaactatatacgcgtaagcttctcgacccattctcatgtttgacagcttatcatcgaatttctgccattcatccgcttattatcacttattcaggcgtagcaaccaggcgtttaagggcaccaataactgccttaaaaaaattacgccccgccctgccactcatcgcagtactgttgtaattcattaagcattctgccgacatggaagccatcacagacggcatgatgaacctgaatcgccagcggcatcagcaccttgtcgccttgcgtataatatttgcccatggtgaaaacgggggcgaagaagttgtccatattggccacgtttaaatcaaaactggtgaaactcacccagggattggctgagacgaaaaacatattctcaataaaccctttagggaaataggccaggttttcaccgtaacacgccacatcttgcgaatatatgtgtagaaactgccggaaatcgtcgtggtattcactccagagcgatgaaaacgtttcagtttgctcatggaaaacggtgtaacaagggtgaacactatcccatatcaccagctcaccgtctttcattgccatacggaattccggatgagcattcatcaggcgggcaagaatgtgaataaaggccggataaaacttgtgcttatttttctttacggtctttaaaaaggccgtaatatccagctgaacggtctggttataggtacattgagcaactgactgaaatgcctcaaaatgttctttacgatgccattgggatatatcaacggtggtatatccagtgatttttttctccattttagcttccttagctcctgaaaatctcgataactcaaaaaatacgcccggtagtgatcttatttcattatggtgaaagttggaacctcttacgtgccgatcaacgtctcattttcgccaaaagttggcccagggcttcccggtatcaacagggacaccaggatttatttattctgcgaagtgatcttccgtcacaggtatttattcgcgataagctcatggagcggcgtaaccgtcgcacaggaaggacagagaaagcgcggatctgggaagtgacggacagaacggtcaggacctggattggggaggcggttgccgccgctgctgctgacggtgtgacgttctctgttccggtcacaccacatacgttccgccattcctatgcgatgcacatgctgtatgccggtataccgctgaaagttctgcaaagcctgatgggacataagtccatcagttcaacggaagtctacacgaaggtttttgcgctggatgtggctgcccggcaccgggtgcagtttgcgatgccggagtctgatgcggttgcgatgctgaaacaattatcctgagaataaatgccttggcctttatatggaaatgtggaactgagtggatatgctgtttttgtctgttaaacagagaagctggctgttatccactgagaagcgaacgaaacagtcgggaaaatctcccattatcgtagagatccgcattattaatctcaggagcctgtgtagcgtttataggaagtagtgttctgtcatgatgcctgcaagcggtaacgaaaacgatttgaatatgccttcaggaacaatagaaatcttcgtgcggtgttacgttgaagtggagcggattatgtcagcaatggacagaacaacctaatgaacacagaaccatgatgtggtctgtccttttacagccagtaggctcgccgcagtcgagcgacggcgaagccctcgagtgagcgaggaagcaccagggaacagcacttatatattctgcttacacacgatgcctgaaaaaacttcccttggggttatccacttatccacggggatatttttataattattttttttatagtttttagatcttcttttttagagcgccttgtaggcctttatccatgctggttctagagaaggtgttgtgacaaattgccctttcagtgtgacaaatcaccctcaaatgacagtcctgtctgtgacaaattgcccttaaccctgtgacaaattgccctcagaagaagctgttttttcacaaagttatccctgcttattgactcttttttatttagtgtgacaatctaaaaacttgtcacacttcacatggatctgtcatggcggaaacagcggttatcaatcacaagaaacgtaaaaatagcccgcgaatcgtccagtcaaacgacctcactgaggcggcatatagtctctcccgggatcaaaaacgtatgctgtatctgttcgttgaccagatcagaaaatctgatggcaccctacaggaacatgacggtatctgcgagatccatgttgctaaatatgctgaaatattcggattgacctctgcggaagccagtaaggatatacggcaggcattgaagagtttcgcggggaaggaagtggttttttatcgccctgaagaggatgccggcgatgaaaaaggctatgaatcttttccttggtttatcaaacgtgcgcacagtccatccagagggctttacagtgtacatatcaacccatatctcattcccttctttatcgggttacagaaccggtttacgcagtttcggcttagtgaaacaaaagaaatcaccaatccgtatgccatgcgtttatacgaatccctgtgtcagtatcgtaagccggatggctcaggcatcgtctctctgaaaatcgactggatcatagagcgttaccagctgcctcaaagttaccagcgtatgcctgacttccgccgccgcttcctgcaggtctgtgttaatgagatcaacagcagaactccaatgcgcctctcatacattgagaaaaagaaaggccgccagacgactcatatcgtattttccttccgcgatatcacttccatgacgacaggatagtctgagggttatctgtcacagatttgagggtggttcgtcacatttgttctgacctactgagggtaatttgtcacagttttgctgtttccttcagcctgcatggattttctcatactttttgaactgtaatttttaaggaagccaaatttgagggcagtttgtcacagttgatttccttctctttcccttcgtcatgtgacctgatatcgggggttagttcgtcatcattgatgagggttgattatcacagtttattactctgaattggctatccgcgtgtgtacctctacctggagtttttcccacggtggatatttcttcttgcgctgagcgtaagagctatctgacagaacagttcttctttgcttcctcgccagttcgctcgctatgctcggttacacggctgcggcgagcgctagtgataataagtgactgaggtatgtgctcttcttatctccttttgtagtgttgctcttattttaaacaactttgcggttttttgatgactttgcgattttgttgttgctttgcagtaaattgcaagatttaataaaaaaacgcaaagcaatgattaaaggatgttcagaatgaaactcatggaaacacttaaccagtgcataaacgctggtcatgaaatgacgaaggctatcgccattgcacagtttaatgatgacagcccggaagcgaggaaaataacccggcgctggagaataggtgaagcagcggatttagttggggtttcttctcaggctatcagagatgccgagaaagcagggcgactaccgcacccggatatggaaattcgaggacgggttgagcaacgtgttggttatacaattgaacaaattaatcatatgcgtgatgtgtttggtacgcgattgcgacgtgctgaagacgtatttccaccggtgatcggggttgctgcccataaaggtggcgtttacaaaacctcagtttctgttcatcttgctcaggatctggctctgaaggggctacgtgttttgctcgtggaaggtaacgacccccagggaacagcctcaatgtatcacggatgggtaccagatcttcatattcatgcagaagacactctcctgcctttctatcttggggaaaaggacgatgtcacttatgcaataaagcccacttgctggccggggcttgacattattccttcctgtctggctctgcaccgtattgaaactgagttaatgggcaaatttgatgaaggtaaactgcccaccgatccacacctgatgctccgactggccattgaaactgttgctcatgactatgatgtcatagttattgacagcgcgcctaacctgggtatcggcacgattaatgtcgtatgtgctgctgatgtgctgattgttcccacgcctgctgagttgtttgactacacctccgcactgcagtttttcgatatgcttcgtgatctgctcaagaacgttgatcttaaagggttcgagcctgatgtacgtattttgcttaccaaatacagcaatagtaatggctctcagtccccgtggatggaggagcaaattcgggatgcctggggaagcatggttctaaaaaatgttgtacgtgaaacggatgaagttggtaaaggtcagatccggatgagaactgtttttgaacaggccattgatcaacgctcttcaactggtgcctggagaaatgctctttctatttgggaacctgtctgcaatgaaattttcgatcgtctgattaaaccacgctgggagattagataatgaagcgtgcgcctgttattccaaaacatacgctcaatactcaaccggttgaagatacttcgttatcgacaccagctgccccgatggtggattcgttaattgcgcgcgtaggagtaatggctcgcggtaatgccattactttgcctgtatgtggtcgggatgtgaagtttactcttgaagtgctccggggtgatagtgttgagaagacctctcgggtatggtcaggtaatgaacgtgaccaggagctgcttactgaggacgcactggatgatctcatcccttcttttctactgactggtcaacagacaccggcgttcggtcgaagagtatctggtgtcatagaaattgccgatgggagtcgccgtcgtaaagctgctgcacttaccgaaagtgattatcgtgttctggttggcgagctggatgatgagcagatggctgcattatccagattgggtaacgattatcgcccaacaagtgcttatgaacgtggtcagcgttatgcaagccgattgcagaatgaatttgctggaaatatttctgcgctggctgatgcggaaaatatttcacgtaagattattacccgctgtatcaacaccgccaaattgcctaaatcagttgttgctcttttttctcaccccggtgaactatctgcccggtcaggtgatgcacttcaaaaagcctttacagataaagaggaattacttaagcagcaggcatctaaccttcatgagcagaaaaaagctggggtgatatttgaagctgaagaagttatcactcttttaacttctgtgcttaaaacgtcatctgcatcaagaactagtttaagctcacgacatcagtttgctcctggagcgacagtattgtataagggcgataaaatggtgcttaacctggacaggtctcgtgttccaactgagtgtatagagaaaattgaggccattcttaaggaacttgaaaagccagcaccctgatgcgaccacgttttagtctacgtttatctgtctttacttaatgtcctttgttacaggccagaaagcataactggcctgaatattctctctgggcccactgttccacttgtatcgtcggtctgataatcagactgggaccacggtcccactcgtatcgtcggtctgattattagtctgggaccacggtcccactcgtatcgtcggtctgattattagtctgggaccacggtcccactcgtatcgtcggtctgataatcagactgggaccacggtcccactcgtatcgtcggtctgattattagtctgggaccatggtcccactcgtatcgtcggtctgattattagtctgggaccacggtcccactcgtatcgtcggtctgattattagtctggaaccacggtcccactcgtatcgtcggtctgattattagtctgggaccacggtcccactcgtatcgtcggtctgattattagtctgggaccacgatcccactcgtgttgtcggtctgattatcggtctgggaccacggtcccacttgtattgtcgatcagactatcagcgtgagactacgattccatcaatgcctgtcaagggcaagtattgacatgtcgtcgtaacctgtagaacggagtaacctcggtgtgcggttgtatgcctgctgtggattgctgctgtgtcctgcttatccacaacattttgcgcacggttatgtggacaaaatacctggttacccaggccgtgccggcacgttaaccgggctgcatccgatgcaagtgtgtcgctgtcgagttt

SEQ ID NO: 85 - DNA, 22656 bp, Artificial Sequence
  Description of Artificial Sequence: Synthetic polynucleotide
aaacggatccttcgaaacgaaattaatacgactcactatagggaagtttttcgcgtctgatgaggccgttaggccgaaactcctctccggagtcacgcgaaaaaatgcgtacaacaaacttgcataaaccaaaaaaatggggcaaataagaatttgataagtaccacttaaatttaactcccttgcttagcgatgggttcgaattcgctatcgatgataaaagtacgtctacaaaatctatttgataatgatgaagtagcgctactaaaaataacgtgttatacggataaactaatacatctaacgaatgcgctagcgaaagcggtaatacatacgataaaactaaatggtatagtatttgtacatgtaataacgtcgtcggatatatgtccgaataataatatagtagtaaaatcgaattttacgacgatgccggtactacaaaatggtggttatatatgggaaatgatggaactaacgcattgttcgcaaccgaatggtctactagatgataattgtgaaataaaattttcgaaaaaactatcggattcgacgatgacgaattatatgaatcaactatcggaactactaggttttgatctaaatccgtaaattataattaatatcaactagcaaatcaatgtcactaacaccattagttaatataaaacttaacagaagacaaaaatggggcaaataaatcaattcagccaacccaaccatggatacgacgcataatgataatacgccgcaacgtctaatgataacggatatgcgtccgctatcgctagaaacgataataacgtcgctaacgcgtgatataataacgcataaatttatatatctaataaatcatgaatgtatagtacgtaaactagatgaacgtcaagcgacgtttacgtttctagtaaattatgaaatgaaactactacataaagtaggttcgacgaaatataaaaaatatacggaatataatacgaaatatggtacgtttccgatgccgatatttataaatcatgatggttttctagaatgtataggtataaaaccgacgaaacatacgccgataatatataaatatgatctaaatccgtaaatttcaacacaatattcacacaatctaaaacaacaactctatgcataactatactccatagtccagatggagcctgaaaattatagtaatttaaaattaaggagagatataagatagaagatggggcaaatacaaagatggctcttagcaaagtcaagttgaatgatacactcaacaaagatcaacttctgtcatccagcaaatacaccatccaacggagcacaggagatagtattgatactcctaattatgatgtgcagaaacacatcaataagttatgtggcatgttattaatcacagaagatgctaatcataaattcactgggttaataggtatgttatatgcgatgtctaggttaggaagagaagacaccataaaaatactcagagatgcgggatatcatgtaaaagcaaatggagtagatgtaacaacacatcgtcaagacattaatggaaaagaaatgaaatttgaagtgttaacattggcaagcttaacaactgaaattcaaatcaacattgagatagaatctagaaaatcctacaaaaaaatgctaaaagaaatgggagaggtagctccagaatacaggcatgactctcctgattgtgggatgataatattatgtatagcagcattagtaataactaaattagcagcaggggacagatctggtcttacagccgtgattaggagagctaataatgtcctaaaaaatgaaatgaaacgttacaaaggcttactacccaaggacatagccaacagcttctatgaagtgtttgaaaaacatccccactttatagatgtttttgttcattttggtatagcacaatcttctaccagaggtggcagtagagttgaagggatttttgcaggattgtttatgaatgcctatggtgcagggcaagtgatgttacggtggggagtcttagcaaaatcagttaaaaatattatgttaggacatgctagtgtgcaagcagaaatggaacaagttgttgaggtttatgaatatgcccaaaaattgggtggtgaagcaggattctaccatatattgaacaacccaaaagcatcattattatctttgactcaatttcctcacttctccagtgtagtattaggcaatgctgctggcctaggcataatgggagagtacagaggtacaccgaggaatcaagatctatatgatgcagcaaaggcatatgctgaacaactcaaagaaaatggtgtgattaactacagtgtactagacttgacagcagaagaactagaggctatcaaacatcagcttaatccaaaagataatgatgtagagctttgagttaataaaaaatggggcaaataaatcatcatggaaaagtttgctcctgaattccatggagaagatgcaaacaacagggctactaaattcctagaatcaataaagggcaaattcacatcacccaaagatcccaagaaaaaagatagtatcatatctgtcaactcaatagatatagaagtaaccaaagaaagccctataacatcaaattcaactattatcaacccaacaaatgagacagatgatactgcagggaacaagcccaattatcaaagaaaacctctagtaagtttcaaagaagaccctacaccaagtgataatcccttttctaaactatacaaagaaaccatagaaacatttgataacaatgaagaagaatccagctattcatacgaagaaataaatgatcagacaaacgataatataacagcaagattagataggattgatgaaaaattaagtgaaatactaggaatgcttcacacattagtagtggcaagtgcaggacctacatctgctcgggatggtataagagatgccatgattggtttaagagaagaaatgatagaaaaaatcagaactgaagcattaatgaccaatgacagattagaagctatggcaagactcaggaatgaggaaagtgaaaagatggcaaaagacacatcagatgaagtgtctctcaatccaacatcagagaaattgaacaacctattggaagggaatgatagtgacaatgatctatcacttgaagatttctgattagttaccactcttcacatcaacacacaataccaacagaagaccaacaaactaaccaacccaatcatccaaccaaacatccatccgccaatcagccaaacagccaacaaaacaaccagccaatccaaaactaaccacccggaaaaaatctataatatagttacaaaaaaaggaaagggtggggcaaatatggaaacatacgtgaacaagcttcacgaaggctccacatacacagctgctgttcaatacaatgtcttagaaaaagacgatgaccctgcatcacttacaatatgggtgcccatgttccaatcatctatgccagcagatttacttataaaagaactagctaatgtcaacatactagtgaaacaaatatccacacccaagggaccttcactaagagtcatgataaactcaagaagtgcagtgctagcacaaatgcccagcaaatttaccatatgcgctaatgtgtccttggatgaaagaagcaaactagcatatgatgtaaccacaccctgtgaaatcaaggcatgtagtctaacatgcctaaaatcaaaaaatatgttgactacagttaaagatctcactatgaagacactcaaccctacacatgatattattgctttatgtgaatttgaaaacatagtaacatcaaaaaaagtcataataccaacatacctaagatccatcagtgtcagaaataaagatctgaacacacttgaaaatataacaaccactgaattcaaaaatgctatcacaaatgcaaaaatcatcccttactcaggattactattagtcatcacagtgactgacaacaaaggagcattcaaatacataaagccacaaagtcaattcatagtagatcttggagcttacctagaaaaagaaagtatatattatgttaccacaaattggaagcacacagctacacgatttgcaatcaaacccatggaagattaacctttttcctctacatcagtgtgttaattcatacaaactttctacctacattcttcacttcaccatcacaatcacaaacactctgtggttcaaccaatcaaacaaaacttatctgaagtcccagatcatcccaagtcattgtttatcagatctagtactcaaataagttaataaaaaatatacacatggacgtccatggggcaaatgcaaacatgtttgtttttcttgttttattgccactagtctctagtcagtgtgttaattttacaaacagaactcaattaccctctgcatacactaattctttcacacgtggtgtttattaccctgacaaagttttcagatcctcagttttacattcaactcaggacttgttcttacctttcttttccaatgttacttggttccatgctatacatgtctctgggaccaatggtactaagaggtttgataaccctgtcctaccatttaatgatggtgtttattttgcttccactgagaagtctaacataataagaggctggatttttggtactactttagattcgaagacccagtccctacttattgttaataacgctactaatgttgttattaaagtctgtgaatttcaattttgtaattatccatttttgggtgtttattaccacaaaaacaacaaaagttggatggaaagtgagttcagagtttattctagtgcgaataattgcacttttgaatatgtctctcagccttttcttatggaccttgaaggaaaacagggtaatttcaaaaatcttagtgaatttgtgtttaagaatattgatggttattttaaaatatattctaagcacacgcctattaatttagtgcgtgatctccctcagggtttttcggctttagaaccattggtagatttgccaataggtattaacatcactaggtttcaaactttacttgctttacatagaagttatttgactcctggtgattcttcttcaggttggacagctggtgctgcagcttattatgtgggttatcttcaacctaggacttttctattaaaatataatgaaaatggaaccattacagatgctgtagactgtgcacttgaccctctctcagaaacaaagtgtacgttgaaatccttcactgtagaaaaaggaatctatcaaacttctaactttagagtccaaccaacagaatctattgttagatttcctaatattacaaacttgtgcccttttggtgaagtttttaacgccaccagatttgcatctgtttatgcttggaacaggaagagaatcagcaactgtgttgctgattattctgtcctatataattccgcatcattttccacttttaagtgttatggagtgtctcctactaaattaaatgatctctgctttactaatgtctatgcagattcatttgtaattagaggtgatgaagtcagacaaatcgctccagggcaaactggaacgattgctgattataattataaattaccagatgattttacaggctgcgttatagcttggaattctaacaatcttgattctaaggttggtggtaattataattacctgtatagattgtttaggaagtctaatctcaaaccttttgagagagatatttcaactgaaatctatcaggccggtagcacaccttgtaatggtgttaaaggttttaattgttactttcctttacaatcatatggtttccaacccacttatggtgttggttaccaaccatacagagtagtagtactttcttttgaacttctacatgcaccagcaactgtttgtggacctaaaaagtctactaatttggttaaaaacaaatgtgtcaatttcaacttcaatggtttaacaggcacaggtgttcttactgagtctaacaaaaagtttctgcctttccaacaatttggcagagacattgctgacactactgatgctgtccgtgatccacagacacttgagattcttgacattacaccatgttcttttggtggtgtcagtgttataacaccaggaacaaatacttctaaccaggttgctgttctttatcagggtgttaactgcacagaagtccctgttgctattcatgcagatcaacttactcctacttggcgtgtttattctacaggttctaatgtttttcaaacacgtgcaggctgtttaataggggctgaatatgtcaacaactcatatgagtgtgacatacccattggtgcaggtatatgcgctagttatcagactcagactaattctcctcggcgggcacgtagtgtagctagtcaatccatcattgcctacactatgtcacttggtgcagaaaattcagttgcttactctaataactctattgccatacccacaaattttactattagtgttaccacagaaattctaccagtgtctatgaccaagacatcagtagattgtacaatgtacatttgtggtgattcaactgaatgcagcaatcttttgttgcaatatggcagtttttgtacacaattaaaccgtgctttaactggaatagctgttgaacaagacaaaaacacccaagaagtttttgcacaagtcaaacaaatttacaaaacaccaccaattaaagattttggtggttttaatttttcacaaatattaccagatccatcaaaaccaagcaagaggtcatttattgaagatctacttttcaacaaagtgacacttgcagatgctggcttcatcaaacaatatggtgattgccttggtgatattgctgctagagacctcatttgtgcacaaaagtttaacggccttactgttttgccacctttgctcacagatgaaatgattgctcaatacacttctgcactgttagcgggtacaatcacttctggttggacctttggtgcaggtgctgcattacaaataccatttgctatgcaaatggcttataggtttaatggtattggagttacacagaatgttctctatgagaaccaaaaattgattgccaaccaatttaatagtgctattggcaaaattcaagactcactttcttccacagcaagtgcacttggaaaacttcaagatgtggtcaaccaaaatgcacaagctttaaacacgcttgttaaacaacttagctccaattttggtgcaatttcaagtgttttaaatgatatcctttcacgtcttgacaaagttgaggctgaagtgcaaattgataggttgatcacaggcagacttcaaagtttgcagacatatgtgactcaacaattaattagagctgcagaaatcagagcttctgctaatcttgctgctattaaaatgtcagagtgtgtacttggacaatcaaaaagagttgatttttgtggaaagggctatcatcttatgtccttccctcagtcagcacctcatggtgtagtcttcttgcatgtgacttatgtccctgcacaagaaaagaacttcacaactgctcctgccatttgtcatgatggaaaagcacactttcctcgtgaaggtgtctttgtttcaaatggcacacactggtttgtaacacaaaggaatttttatgaaccacaaatcattactacagacaacacatttgtgtctggtaactgtgatgttgtaataggaattgtcaacaacacagtttatgatcctttgcaacctgaattagactcattcaaggaggagttagataaatattttaagaatcatacatcaccagatgttgatttaggtgacatctctggcattaatgcttcatttgtaaacattcaaaaagaaattgaccgcctcaatgaggttgccaagaatttaaatgaatctctcatcgatctccaagaacttggaaagtatgagcagtatataaaatggccatggtacatttggctaggttttatagctggcttgattgccatagtaatggtgacaattatgctttgctgtatgaccagttgctgtagttgtctcaagggctgttgttcttgtggatcctgctgcaaatttgatgaagacgacggactgctcctatactgtaaggccagaagcacaccaatcacactaagcaaggatcaactgagtggtataaataatattgcatttagtaactaaataaaaatagcacctaatcatgttcttacaatggtttactatctgctcatagacaacccatctatcattggattttcttaaaatctgaacttcatcgaaactcttatctataaaccatctcacttacactatttaagtagattcctagtttatagttatataaaacacaattgaatgccagtcgaccttaccatctgtaaaaatgaaaactggggcaaatatgtcacgaaggaatccttgcaaatttgaaattcgaggtcattgcttaaatggtaagaggtgtcattttagtcataattattttgaatggccaccccatgcactgcttgtaagacaaaactttatgttaaacagaatacttaagtctatggataaaagtatagataccttatcagaaataagtggagctgcagagttggacagaacagaagagtatgctcttggtgtagttggagtgctagagagttatataggatcaataaacaatataactaaacaatcagcatgtgttgccatgagcaaactcctcactgaactcaatagtgatgatatcaaaaagctgagggacaatgaagagctaaattcacccaagataagagtgtacaatactgtcatatcatatattgaaagcaacaggaaaaacaataaacaaactatccatctgttaaaaagattgccagcagacgtattgaagaaaaccatcaaaaacacattggatatccataagagcataaccatcaacaacccaaaagaatcaactgttagtgatacaaatgaccatgccaaaaataatgatactacctgacaaatatccttgtagtataacttccatactaataacaagtagatgtagagttactatgtataatcaaaagaacacactatatttcaatcaaaacaacccaaataaccatatgtactcaccgaatcaaacattcaatgaaatccattggacctctcaagaattgattgacacaattcaaaattttctacaacatctaggtattattgaggatatatatacaatatatatattagtgtcataacactcaattctaacactcaccacatcgttacattattaattcaaacaattcaagttgtgggacaaaatggatcccattattaatggaaattctgctaatgtttatctaaccgatagttatttaaaaggtgttatctctttctcagagtgtaatgctttaggaagttacatattcaatggtccttatctcaaaaatgattataccaacttaattagtagacaaaatccattaatagaacacatgaatctaaagaaactaaatataacacagtccttaatatctaagtatcataaaggtgaaataaaattagaagaacctacttattttcagtcattacttatgacatacaagagtatgacctcgtcagaacagattgctaccactaatttacttaaaaagataataagaagagctatagaaataagtgatgtcaaagtctatgctatattgaataaactagggcttaaagaaaaggacaagattaaatccaacaatggacaagatgaagacaactcagttattacgaccataatcaaagatgatatactttcagctgttaaagataatcaatctcatcttaaagcagacaaaaatcactctacaaaacaaaaagacacaatcaaaacaacactcttgaagaaattgatgtgttcaatgcaacatcctccatcatggttaatacattggtttaacttatacacaaaattaaacaacatattaacacagtatcgatcaaatgaggtaaaaaaccatgggtttacattgatagataatcaaactcttagtggatttcaatttattttgaaccaatatggttgtatagtttatcataaggaactcaaaagaattactgtgacaacctataatcaattcttgacatggaaagatattagccttagtagattaaatgtttgtttaattacatggattagtaactgcttgaacacattaaataaaagcttaggcttaagatgcggattcaataatgttatcttgacacaactattcctttatggagattgtatactaaagctatttcacaatgaggggttctacataataaaagaggtagagggatttattatgtctctaattttaaatataacagaagaagatcaattcagaaaacgattttataatagtatgctcaacaacatcacagatgctgctaataaagctcagaaaaatctgctatcaagagtatgtcatacattattagataagacagtgtccgataatataataaatggcagatggataattctattaagtaagttccttaaattaattaagcttgcaggtgacaataaccttaacaatctgagtgaactatattttttgttcagaatatttggacacccaatggtagatgaaagacaagccatggatgctgttaaaattaattgcaatgagaccaaattttacttgttaagcagtctgagtatgttaagaggtgcctttatatatagaattataaaagggtttgtaaataattacaacagatggcctactttaagaaatgctattgttttacccttaagatggttaacttactataaactaaacacttatccttctttgttggaacttacagaaagagatttgattgtgttatcaggactacgtttctatcgtgagtttcggttgcctaaaaaagtggatcttgaaatgattataaatgataaagctatatcacctcctaaaaatttgatatggactagtttccctagaaattacatgccatcacacatacaaaactatatagaacatgaaaaattaaaattttccgagagtgataaatcaagaagagtattagagtattatttaagagataacaaattcaatgaatgtgatttatacaactgtgtagttaatcaaagttatctcaacaaccctaatcatgtggtatcattgacaggcaaagaaagagaactcagtgtaggtagaatgtttgcaatgcaaccgggaatgttcagacaggttcaaatattggcagagaaaatgatagctgaaaacattttacaattctttcctgaaagtcttacaagatatggtgatctagaactacaaaaaatattagaattgaaagcaggaataagtaacaaatcaaatcgctacaatgataattacaacaattacattagtaagtgctctatcatcacagatctcagcaaattcaatcaagcatttcgatatgaaacgtcatgtatttgtagtgatgtgctggatgaactgcatggtgtacaatctctattttcctggttacatttaactattcctcatgtcacaataatatgcacatataggcatgcacccccctatataggagatcatattgtagatcttaacaatgtagatgaacaaagtggattatatagatatcacatgggtggcatcgaagggtggtgtcaaaaactgtggaccatagaagctatatcactattggatctaatatctctcaaagggaaattctcaattactgctttaattaatggtgacaatcaatcaatagatataagcaaaccaatcagactcatggaaggtcaaactcatgctcaagcagattatttgctagcattaaatagccttaaattactgtataaagagtatgcaggcataggccacaaattaaaaggaactgagacttatatatcacgagatatgcaatttatgagtaaaacaattcaacataacggtgtatattacccagctagtataaagaaagtcctaagagtgggaccgtggataaacactatacttgatgatttcaaagtgagtctagaatctataggtagtttgacacaagaattagaatatagaggtgaaagtctattatgcagtttaatatttagaaatgtatggttatataatcagattgctctacaattaaaaaatcatgcattatgtaacaataaactatatttggacatattaaaggttctgaaacacttaaaaaccttttttaatcttgataatattgatacagcattaacattgtatatgaatttacccatgttatttggtggtggtgatcccaacttgttatatcgaagtttctatagaagaactcctgacttcctcacagaggctatagttcactctgtgttcatacttagttattatacaaaccatgacttaaaagataaacttcaagatctgtcagatgatagattgaataagttcttaacatgcataatcacgtttgacaaaaaccctaatgctgaattcgtaacattgatgagagatcctcaagctttagggtctgagagacaagctaaaattactagcgaaatcaatagactggcagttacagaggttttgagtacagctccaaacaaaatattctccaaaagtgcacaacattatactactacagagatagatctaaatgatattatgcaaaatatagaacctacatatcctcatgggctaagagttgtttatgaaagtttacccttttataaagcagagaaaatagtaaatcttatatcaggtacaaaatctataactaacatactggaaaaaacttctgccatagacttaacagatattgatagagccactgagatgatgaggaaaaacataactttgcttataaggatacttccattggattgtaacagagataaaagagagatattgagtatggaaaacctaagtattactgaattaagcaaatatgttagggaaagatcttggtctttatccaatatagttggtgttacatcacccagtatcatgtatacaatggacatcaaatatactacaagcactatatctagtggcataattatagagaaatataatgttaacagtttaacacgtggtgagagaggacccactaaaccatgggttggttcatctacacaagagaaaaaaacaatgccagtttataatagacaagtcttaaccaaaaaacagagagatcaaatagatctattagcaaaattggattgggtgtatgcatctatagataacaaggatgaattcatggaagaactcagcataggaacccttgggttaacatatgaaaaggccaagaaattatttccacaatatttaagtgtcaattatttgcatcgccttacagtcagtagtagaccatgtgaattccctgcatcaataccagcttatagaacaacaaattatcactttgacactagccctattaatcgcatattaacagaaaagtatggtgatgaagatattgacatagtattccaaaactgtataagctttggccttagtttaatgtcagtagtagaacaatttactaatgtatgtcctaacagaattattctcatacctaagcttaatgagatacatttgatgaaacctcccatattcacaggtgatgttgatattcacaagttaaaacaagtgatacaaaaacagcatatgtttttaccagacaaaataagtttgactcaatatgtggaattattcttaagtaataaaacactcaaatctggatctcatgttaattctaatttaatattggcacataaaatatctgactattttcataatacttacattttaagtactaatttagctggacattggattctgattatacaacttatgaaagattctaaaggtatttttgaaaaagattggggagagggatatataactgatcatatgtttattaatttgaaagttttcttcaatgcttataagacctatctcttgtgttttcataaaggttatggcaaagcaaagctggagtgtgatatgaacacttcagatcttctatgtgtattggaattaatagacagtagttattggaagtctatgtctaaggtatttttagaacaaaaagttatcaaatacattcttagccaagatgcaagtttacatagagtaaaaggatgtcatagcttcaaattatggtttcttaaacgtcttaatgtagcagaattcacagtttgcccttgggttgttaacatagattatcatccaacacatatgaaagcaatattaacttatatagatcttgttagaatgggattgataaatatagatagaatacacattaaaaataaacacaaattcaatgatgaattttatacttctaatctcttctacattaattataacttctcagataatactcatctattaactaaacatataaggattgctaattctgaattagaaaataattacaacaaattatatcatcctacaccagaaaccctagagaatatactagccaatccgattaaaagtaatgacaaaaagacactgaatgactattgtataggtaaaaatgttgactcaataatgttaccattgttatctaataagaagcttattaaatcgtctgcaatgattagaaccaattacagcaaacaagatttgtataatttattccctatggttgtgattgatagaattatagatcattcaggcaatacagccaaatccaaccaactttacactactacttcccaccaaatatctttagtgcacaatagcacatcactttactgcatgcttccttggcatcatattaatagattcaattttgtatttagttctacaggttgtaaaattagtatagagtatattttaaaagatcttaaaattaaagatcccaattgtatagcattcataggtgaaggagcagggaatttattattgcgtacagtagtggaacttcatcctgacataagatatatttacagaagtctgaaagattgcaatgatcatagtttacctattgagtttttaaggctgtacaatggacatatcaacattgattatggtgaaaatttgaccattcctgctacagatgcaaccaacaacattcattggtcttatttacatataaagtttgctgaacctatcagtctttttgtctgtgatgccgaattgtctgtaacagtcaactggagtaaaattataatagaatggagcaagcatgtaagaaagtgcaagtactgttcctcagttaataaatgtatgttaatagtaaaatatcatgctcaagatgatattgatttcaaattagacaatataactatattaaaaacttatgtatgcttaggcagtaagttaaagggatcggaggtttacttagtccttacaataggtcctgcgaatatattcccagtatttaatgtagtacaaaatgctaaattgatactatcaagaaccaaaaatttcatcatgcctaagaaagctgataaagagtctattgatgcaaatattaaaagtttgataccctttctttgttaccctataacaaaaaaaggaattaatactgcattgtcaaaactaaagagtgttgttagtggagatatactatcatattctatagctggacgtaatgaagttttcagcaataaacttataaatcataagcatatgaacatcttaaaatggttcaatcatgttttaaatttcagatcaacagaactaaactataaccatttatatatggtagaatctacatatccttacctaagtgaattgttaaacagcttgacaaccaatgaacttaaaaaactgattaaaatcacaggtagtctgttatacaactttcataatgaataatgaataaagatcttataataaaaattcccatagctatacactaacactgtattcaattatagttattaaaaattaaaaatcgtacgattttttaaataacttttagtgaactaatcctaaagttatcattttaatcttggaggaataaatttaaaccctaatctaattggtttatatgtgtattaactaaattacgagatattagtttttgacactttttttctcgtgggtcggcatggcatctccacctcctcgcggtccgacctgggcatccgaaggaggacgcacgtccactcggatggctaagggagctgctaacaaagcccgaaaggaagctgagttggctgctgccaccgctgagcaataactagcataaccccttggggcctctaaacgggtcttgaggggttttttgctgaaaggaggaactatatacgcgtaagcttctcgacccattctcatgtttgacagcttatcatcgaatttctgccattcatccgcttattatcacttattcaggcgtagcaaccaggcgtttaagggcaccaataactgccttaaaaaaattacgccccgccctgccactcatcgcagtactgttgtaattcattaagcattctgccgacatggaagccatcacagacggcatgatgaacctgaatcgccagcggcatcagcaccttgtcgccttgcgtataatatttgcccatggtgaaaacgggggcgaagaagttgtccatattggccacgtttaaatcaaaactggtgaaactcacccagggattggctgagacgaaaaacatattctcaataaaccctttagggaaataggccaggttttcaccgtaacacgccacatcttgcgaatatatgtgtagaaactgccggaaatcgtcgtggtattcactccagagcgatgaaaacgtttcagtttgctcatggaaaacggtgtaacaagggtgaacactatcccatatcaccagctcaccgtctttcattgccatacggaattccggatgagcattcatcaggcgggcaagaatgtgaataaaggccggataaaacttgtgcttatttttctttacggtctttaaaaaggccgtaatatccagctgaacggtctggttataggtacattgagcaactgactgaaatgcctcaaaatgttctttacgatgccattgggatatatcaacggtggtatatccagtgatttttttctccattttagcttccttagctcctgaaaatctcgataactcaaaaaatacgcccggtagtgatcttatttcattatggtgaaagttggaacctcttacgtgccgatcaacgtctcattttcgccaaaagttggcccagggcttcccggtatcaacagggacaccaggatttatttattctgcgaagtgatcttccgtcacaggtatttattcgcgataagctcatggagcggcgtaaccgtcgcacaggaaggacagagaaagcgcggatctgggaagtgacggacagaacggtcaggacctggattggggaggcggttgccgccgctgctgctgacggtgtgacgttctctgttccggtcacaccacatacgttccgccattcctatgcgatgcacatgctgtatgccggtataccgctgaaagttctgcaaagcctgatgggacataagtccatcagttcaacggaagtctacacgaaggtttttgcgctggatgtggctgcccggcaccgggtgcagtttgcgatgccggagtctgatgcggttgcgatgctgaaacaattatcctgagaataaatgccttggcctttatatggaaatgtggaactgagtggatatgctgtttttgtctgttaaacagagaagctggctgttatccactgagaagcgaacgaaacagtcgggaaaatctcccattatcgtagagatccgcattattaatctcaggagcctgtgtagcgtttataggaagtagtgttctgtcatgatgcctgcaagcggtaacgaaaacgatttgaatatgccttcaggaacaatagaaatcttcgtgcggtgttacgttgaagtggagcggattatgtcagcaatggacagaacaacctaatgaacacagaaccatgatgtggtctgtccttttacagccagtaggctcgccgcagtcgagcgacggcgaagccctcgagtgagcgaggaagcaccagggaacagcacttatatattctgcttacacacgatgcctgaaaaaacttcccttggggttatccacttatccacggggatatttttataattattttttttatagtttttagatcttcttttttagagcgccttgtaggcctttatccatgctggttctagagaaggtgttgtgacaaattgccctttcagtgtgacaaatcaccctcaaatgacagtcctgtctgtgacaaattgcccttaaccctgtgacaaattgccctcagaagaagctgttttttcacaaagttatccctgcttattgactcttttttatttagtgtgacaatctaaaaacttgtcacacttcacatggatctgtcatggcggaaacagcggttatcaatcacaagaaacgtaaaaatagcccgcgaatcgtccagtcaaacgacctcactgaggcggcatatagtctctcccgggatcaaaaacgtatgctgtatctgttcgttgaccagatcagaaaatctgatggcaccctacaggaacatgacggtatctgcgagatccatgttgctaaatatgctgaaatattcggattgacctctgcggaagccagtaaggatatacggcaggcattgaagagtttcgcggggaaggaagtggttttttatcgccctgaagaggatgccggcgatgaaaaaggctatgaatcttttccttggtttatcaaacgtgcgcacagtccatccagagggctttacagtgtacatatcaacccatatctcattcccttctttatcgggttacagaaccggtttacgcagtttcggcttagtgaaacaaaagaaatcaccaatccgtatgccatgcgtttatacgaatccctgtgtcagtatcgtaagccggatggctcaggcatcgtctctctgaaaatcgactggatcatagagcgttaccagctgcctcaaagttaccagcgtatgcctgacttccgccgccgcttcctgcaggtctgtgttaatgagatcaacagcagaactccaatgcgcctctcatacattgagaaaaagaaaggccgccagacgactcatatcgtattttccttccgcgatatcacttccatgacgacaggatagtctgagggttatctgtcacagatttgagggtggttcgtcacatttgttctgacctactgagggtaatttgtcacagttttgctgtttccttcagcctgcatggattttctcatactttttgaactgtaatttttaaggaagccaaatttgagggcagtttgtcacagttgatttccttctctttcccttcgtcatgtgacctgatatcgggggttagttcgtcatcattgatgagggttgattatcacagtttattactctgaattggctatccgcgtgtgtacctctacctggagtttttcccacggtggatatttcttcttgcgctgagcgtaagagctatctgacagaacagttcttctttgcttcctcgccagttcgctcgctatgctcggttacacggctgcggcgagcgctagtgataataagtgactgaggtatgtgctcttcttatctccttttgtagtgttgctcttattttaaacaactttgcggttttttgatgactttgcgattttgttgttgctttgcagtaaattgcaagatttaataaaaaaacgcaaagcaatgattaaaggatgttcagaatgaaactcatggaaacacttaaccagtgcataaacgctggtcatgaaatgacgaaggctatcgccattgcacagtttaatgatgacagcccggaagcgaggaaaataacccggcgctggagaataggtgaagcagcggatttagttggggtttcttctcaggctatcagagatgccgagaaagcagggcgactaccgcacccggatatggaaattcgaggacgggttgagcaacgtgttggttatacaattgaacaaattaatcatatgcgtgatgtgtttggtacgcgattgcgacgtgctgaagacgtatttccaccggtgatcggggttgctgcccataaaggtggcgtttacaaaacctcagtttctgttcatcttgctcaggatctggctctgaaggggctacgtgttttgctcgtggaaggtaacgacccccagggaacagcctcaatgtatcacggatgggtaccagatcttcatattcatgcagaagacactctcctgcctttctatcttggggaaaaggacgatgtcacttatgcaataaagcccacttgctggccggggcttgacattattccttcctgtctggctctgcaccgtattgaaactgagttaatgggcaaatttgatgaaggtaaactgcccaccgatccacacctgatgctccgactggccattgaaactgttgctcatgactatgatgtcatagttattgacagcgcgcctaacctgggtatcggcacgattaatgtcgtatgtgctgctgatgtgctgattgttcccacgcctgctgagttgtttgactacacctccgcactgcagtttttcgatatgcttcgtgatctgctcaagaacgttgatcttaaagggttcgagcctgatgtacgtattttgcttaccaaatacagcaatagtaatggctctcagtccccgtggatggaggagcaaattcgggatgcctggggaagcatggttctaaaaaatgttgtacgtgaaacggatgaagttggtaaaggtcagatccggatgagaactgtttttgaacaggccattgatcaacgctcttcaactggtgcctggagaaatgctctttctatttgggaacctgtctgcaatgaaattttcgatcgtctgattaaaccacgctgggagattagataatgaagcgtgcgcctgttattccaaaacatacgctcaatactcaaccggttgaagatacttcgttatcgacaccagctgccccgatggtggattcgttaattgcgcgcgtaggagtaatggctcgcggtaatgccattactttgcctgtatgtggtcgggatgtgaagtttactcttgaagtgctccggggtgatagtgttgagaagacctctcgggtatggtcaggtaatgaacgtgaccaggagctgcttactgaggacgcactggatgatctcatcccttcttttctactgactggtcaacagacaccggcgttcggtcgaagagtatctggtgtcatagaaattgccgatgggagtcgccgtcgtaaagctgctgcacttaccgaaagtgattatcgtgttctggttggcgagctggatgatgagcagatggctgcattatccagattgggtaacgattatcgcccaacaagtgcttatgaacgtggtcagcgttatgcaagccgattgcagaatgaatttgctggaaatatttctgcgctggctgatgcggaaaatatttcacgtaagattattacccgctgtatcaacaccgccaaattgcctaaatcagttgttgctcttttttctcaccccggtgaactatctgcccggtcaggtgatgcacttcaaaaagcctttacagataaagaggaattacttaagcagcaggcatctaaccttcatgagcagaaaaaagctggggtgatatttgaagctgaagaagttatcactcttttaacttctgtgcttaaaacgtcatctgcatcaagaactagtttaagctcacgacatcagtttgctcctggagcgacagtattgtataagggcgataaaatggtgcttaacctggacaggtctcgtgttccaactgagtgtatagagaaaattgaggccattcttaaggaacttgaaaagccagcaccctgatgcgaccacgttttagtctacgtttatctgtctttacttaatgtcctttgttacaggccagaaagcataactggcctgaatattctctctgggcccactgttccacttgtatcgtcggtctgataatcagactgggaccacggtcccactcgtatcgtcggtctgattattagtctgggaccacggtcccactcgtatcgtcggtctgattattagtctgggaccacggtcccactcgtatcgtcggtctgataatcagactgggaccacggtcccactcgtatcgtcggtctgattattagtctgggaccatggtcccactcgtatcgtcggtctgattattagtctgggaccacggtcccactcgtatcgtcggtctgattattagtctggaaccacggtcccactcgtatcgtcggtctgattattagtctgggaccacggtcccactcgtatcgtcggtctgattattagtctgggaccacgatcccactcgtgttgtcggtctgattatcggtctgggaccacggtcccacttgtattgtcgatcagactatcagcgtgagactacgattccatcaatgcctgtcaagggcaagtattgacatgtcgtcgtaacctgtagaacggagtaacctcggtgtgcggttgtatgcctgctgtggattgctgctgtgtcctgcttatccacaacattttgcgcacggttatgtggacaaaatacctggttacccaggccgtgccggcacgttaaccgggctgcatccgatgcaagtgtgtcgctgtcgagttt

SEQ ID NO: 86 - protein, 1286 aa, Artificial Sequence
  Description of Artificial Sequence: Synthetic polypeptide
MFVFLVLLPLVSSQCVNLTTRTQLPPAYTNSFTRGVYYPDKVFRSSVLHSTQDLFLPFFSNVTWFHAIHVSGTNGTKRFDNPVLPFNDGVYFASTEKSNIIRGWIFGTTLDSKTQSLLIVNNATNVVIKVCEFQFCNDPFLGVYYHKNNKSWMESEFRVYSSANNCTFEYVSQPFLMDLEGKQGNFKNLREFVFKNIDGYFKIYSKHTPINLVRDLPQGFSALEPLVDLPIGINITRFQTLLALHRSYLTPGDSSSGWTAGAAAYYVGYLQPRTFLLKYNENGTITDAVDCALDPLSETKCTLKSFTVEKGIYQTSNFRVQPTESIVRFPNITNLCPFGEVFNATRFASVYAWNRKRISNCVADYSVLYNSASFSTFKCYGVSPTKLNDLCFTNVYADSFVIRGDEVRQIAPGQTGKIADYNYKLPDDFTGCVIAWNSNNLDSKVGGNYNYLYRLFRKSNLKPFERDISTEIYQAGSTPCNGVEGFNCYFPLQSYGFQPTNGVGYQPYRVVVLSFELLHAPATVCGPKKSTNLVKNKCVNFNFNGLTGTGVLTESNKKFLPFQQFGRDIADTTDAVRDPQTLEILDITPCSFGGVSVITPGTNTSNQVAVLYQDVNCTEVPVAIHADQLTPTWRVYSTGSNVFQTRAGCLIGAEHVNNSYECDIPIGAGICASYQTQTNSRSVASQSIIAYTMSLGAENSVAYSNNSIAIPTNFTISVTTEILPVSMTKTSVDCTMYICGDSTECSNLLLQYGSFCTQLNRALTGIAVEQDKNTQEVFAQVKQIYKTPPIKDFGGFNFSQILPDPSKPSKRSFIEDLLFNKVTLADAGFIKQYGDCLGDIAARDLICAQKFNGLTVLPPLLTDEMIAQYTSALLAGTITSGWTFGAGAALQIPFAMQMAYRFNGIGVTQNVLYENQKLIANQFNSAIGKIQDSLSSTASALGKLQDVVNQNAQALNTLVKQLSSNFGAISSVLNDILSRLDKVEAEVQIDRLITGRLQSLQTYVTQQLIRAAEIRASANLAATKMSECVLGQSKRVDFCGKGYHLMSFPQSAPHGVVFLHVTYVPAQEKNFTTAPAICHDGKAHFPREGVFVSNGTHWFVTQRNFYEPQIITTDNTFVSGNCDVVIGIVNNTVYDPLQPELDSFKEELDKYFKNHTSPDVDLGDISGINASVVNIQKEIDRLNEVAKNLNESLIDLQELGKYEQYIKWPWYIWLGFIAGLIAIVMVTIMLCCMTSCCSCLKGCCSCGSCCKFDEDDGLLLYCKARSTPITLSKDQLSGINNIAFSN

SEQ ID NO: 87 - DNA, 3861 bp, Artificial Sequence
  Description of Artificial Sequence: Synthetic polynucleotide
atgtttgtttttcttgttttattgccactagtctctagtcagtgtgttaatcttacaaccagaactcaattaccccctgcatacactaattctttcacacgtggtgtttattaccctgacaaagttttcagatcctcagttttacattcaactcaggacttgttcttacctttcttttccaatgttacttggttccatgctatacatgtctctgggaccaatggtactaagaggtttgataaccctgtcctaccatttaatgatggtgtttattttgcttccactgagaagtctaacataataagaggctggatttttggtactactttagattcgaagacccagtccctacttattgttaataacgctactaatgttgttattaaagtctgtgaatttcaattttgtaatgatccatttttgggtgtttattaccacaaaaacaacaaaagttggatggaaagtgagttcagagtttattctagtgcgaataattgcacttttgaatatgtctctcagccttttcttatggaccttgaaggaaaacagggtaatttcaaaaatcttagggaatttgtgtttaagaatattgatggttattttaaaatatattctaagcacacgcctattaatttagtgcgtgatctccctcagggtttttcggctttagaaccattggtagatttgccaataggtattaacatcactaggtttcaaactttacttgctttacatagaagttatttgactcctggtgattcttcttcaggttggacagctggtgctgcagcttattatgtgggttatcttcaacctaggacttttctattaaaatataatgaaaatggaaccattacagatgctgtagactgtgcacttgaccctctctcagaaacaaagtgtacgttgaaatccttcactgtagaaaaaggaatctatcaaacttctaactttagagtccaaccaacagaatctattgttagatttcctaatattacaaacttgtgcccttttggtgaagtttttaacgccaccagatttgcatctgtttatgcttggaacaggaagagaatcagcaactgtgttgctgattattctgtcctatataattccgcatcattttccacttttaagtgttatggagtgtctcctactaaattaaatgatctctgctttactaatgtctatgcagattcatttgtaattagaggtgatgaagtcagacaaatcgctccagggcaaactggaaagattgctgattataattataaattaccagatgattttacaggctgcgttatagcttggaattctaacaatcttgattctaaggttggtggtaattataattacctgtatagattgtttaggaagtctaatctcaaaccttttgagagagatatttcaactgaaatctatcaggccggtagcacaccttgtaatggtgttgaaggttttaattgttactttcctttacaatcatatggtttccaacccactaatggtgttggttaccaaccatacagagtagtagtactttcttttgaacttctacatgcaccagcaactgtttgtggacctaaaaagtctactaatttggttaaaaacaaatgtgtcaatttcaacttcaatggtttaacaggcacaggtgttcttactgagtctaacaaaaagtttctgcctttccaacaatttggcagagacattgctgacactactgatgctgtccgtgatccacagacacttgagattcttgacattacaccatgttcttttggtggtgtcagtgttataacaccaggaacaaatacttctaaccaggttgctgttctttatcaggatgttaactgcacagaagtccctgttgctattcatgcagatcaacttactcctacttggcgtgtttattctacaggttctaatgtttttcaaacacgtgcaggctgtttaataggggctgaacatgtcaacaactcatatgagtgtgacatacccattggtgcaggtatatgcgctagttatcagactcagactaattctcgtagtgtagctagtcaatccatcattgcctacactatgtcacttggtgcagaaaattcagttgcttactctaataactctattgccatacccacaaattttactattagtgttaccacagaaattctaccagtgtctatgaccaagacatcagtagattgtacaatgtacatttgtggtgattcaactgaatgcagcaatcttttgttgcaatatggcagtttttgtacacaattaaaccgtgctttaactggaatagctgttgaacaagacaaaaacacccaagaagtttttgcacaagtcaaacaaatttacaaaacaccaccaattaaagattttggtggttttaatttttcacaaatattaccagatccatcaaaaccaagcaagaggtcatttattgaagatctacttttcaacaaagtgacacttgcagatgctggcttcatcaaacaatatggtgattgccttggtgatattgctgctagagacctcatttgtgcacaaaagtttaacggccttactgttttgccacctttgctcacagatgaaatgattgctcaatacacttctgcactgttagcgggtacaatcacttctggttggacctttggtgcaggtgctgcattacaaataccatttgctatgcaaatggcttataggtttaatggtattggagttacacagaatgttctctatgagaaccaaaaattgattgccaaccaatttaatagtgctattggcaaaattcaagactcactttcttccacagcaagtgcacttggaaaacttcaagatgtggtcaaccaaaatgcacaagctttaaacacgcttgttaaacaacttagctccaattttggtgcaatttcaagtgttttaaatgatatcctttcacgtcttgacaaagttgaggctgaagtgcaaattgataggttgatcacaggcagacttcaaagtttgcagacatatgtgactcaacaattaattagagctgcagaaatcagagcttctgctaatcttgctgctactaaaatgtcagagtgtgtacttggacaatcaaaaagagttgatttttgtggaaagggctatcatcttatgtccttccctcagtcagcacctcatggtgtagtcttcttgcatgtgacttatgtccctgcacaagaaaagaacttcacaactgctcctgccatttgtcatgatggaaaagcacactttcctcgtgaaggtgtctttgtttcaaatggcacacactggtttgtaacacaaaggaatttttatgaaccacaaatcattactacagacaacacatttgtgtctggtaactgtgatgttgtaataggaattgtcaacaacacagtttatgatcctttgcaacctgaattagactcattcaaggaggagttagataaatattttaagaatcatacatcaccagatgttgatttaggtgacatctctggcattaatgcttcagttgtaaacattcaaaaagaaattgaccgcctcaatgaggttgccaagaatttaaatgaatctctcatcgatctccaagaacttggaaagtatgagcagtatataaaatggccatggtacatttggctaggttttatagctggcttgattgccatagtaatggtgacaattatgctttgctgtatgaccagttgctgtagttgtctcaagggctgttgttcttgtggatcctgctgcaaatttgatgaagacgacggactgctcctatactgtaaggccagaagcacaccaatcacactaagcaaggatcaactgagtggtataaataatattgcatttagtaactaa

SEQ ID NO: 88 - DNA, 16737 bp, Artificial Sequence
  Description of Artificial Sequence: Synthetic polynucleotide
acgcgaaaaaatgcgtacaacaaacttgcataaaccaaaaaaatggggcaaataagaatttgataagtaccacttaaatttaactcccttgcttagcgatggtgagcgagctgattaaggagaacatgcacatgaagctgtacatggagggcaccgtgaacaaccaccacttcaagtgcacatccgagggcgaaggcaagccctacgagggcacccagaccatgagaatcaaggcggtcgagggcggccctctccccttcgccttcgacatcctggctaccagcttcatgtacggcagcaaaaccttcatcaaccacacccagggcatccccgacttctttaagcagtccttccccgagggcttcacatgggagagagtcaccacatacgaagacgggggcgtgctgaccgctacccaggacaccagcctccaggacggctgcctcatctacaacgtcaagatcagaggggtgaacttcccatccaacggccctgtgatgcagaagaaaacactcggctgggaggcctccaccgagaccctgtaccccgctgacggcggcctggaaggcagagccgacatggccctgaagctcgtgggcgggggccacctgatctgcaacttgaagaccacatacagatccaagaaacccgctaagaacctcaagatgcccggcgtctactatgtggacagaagactggaaagaatcaaggaggccgacaaagagacctacgtcgagcagcacgaggtggctgtggccagatactgcgacctccctagcaaactggggcacagatgagtattcaattatagttattaaaaacttaacagaagacaaaaatggggcaaataagaatttgataagtaccacttaaatttaactcccttgcttagcgatgggttcgaattcgctatcgatgataaaagtacgtctacaaaatctatttgataatgatgaagtagcgctactaaaaataacgtgttatacggataaactaatacatctaacgaatgcgctagcgaaagcggtaatacatacgataaaactaaatggtatagtatttgtacatgtaataacgtcgtcggatatatgtccgaataataatatagtagtaaaatcgaattttacgacgatgccggtactacaaaatggtggttatatatgggaaatgatggaactaacgcattgttcgcaaccgaatggtctactagatgataattgtgaaataaaattttcgaaaaaactatcggattcgacgatgacgaattatatgaatcaactatcggaactactaggttttgatctaaatccgtaaattataattaatatcaactagcaaatcaatgtcactaacaccattagttaatataaaacttaacagaagacaaaaatggggcaaataaatcaattcagccaacccaaccatggatacgacgcataatgataatacgccgcaacgtctaatgataacggatatgcgtccgctatcgctagaaacgataataacgtcgctaacgcgtgatataataacgcataaatttatatatctaataaatcatgaatgtatagtacgtaaactagatgaacgtcaagcgacgtttacgtttctagtaaattatgaaatgaaactactacataaagtaggttcgacgaaatataaaaaatatacggaatataatacgaaatatggtacgtttccgatgccgatatttataaatcatgatggttttctagaatgtataggtataaaaccgacgaaacatacgccgataatatataaatatgatctaaatccgtaaatttcaacacaatattcacacaatctaaaacaacaactctatgcataactatactccatagtccagatggagcctgaaaattatagtaatttaaaattaaggagagatataagatagaagatggggcaaatacaaagatggctcttagcaaagtcaagttgaatgatacactcaacaaagatcaacttctgtcatccagcaaatacaccatccaacggagcacaggagatagtattgatactcctaattatgatgtgcagaaacacatcaataagttatgtggcatgttattaatcacagaagatgctaatcataaattcactgggttaataggtatgttatatgcgatgtctaggttaggaagagaagacaccataaaaatactcagagatgcgggatatcatgtaaaagcaaatggagtagatgtaacaacacatcgtcaagacattaatggaaaagaaatgaaatttgaagtgttaacattggcaagcttaacaactgaaattcaaatcaacattgagatagaatctagaaaatcctacaaaaaaatgctaaaagaaatgggagaggtagctccagaatacaggcatgactctcctgattgtgggatgataatattatgtatagcagcattagtaataactaaattagcagcaggggacagatctggtcttacagccgtgattaggagagctaataatgtcctaaaaaatgaaatgaaacgttacaaaggcttactacccaaggacatagccaacagcttctatgaagtgtttgaaaaacatccccactttatagatgtttttgttcattttggtatagcacaatcttctaccagaggtggcagtagagttgaagggatttttgcaggattgtttatgaatgcctatggtgcagggcaagtgatgttacggtggggagtcttagcaaaatcagttaaaaatattatgttaggacatgctagtgtgcaagcagaaatggaacaagttgttgaggtttatgaatatgcccaaaaattgggtggtgaagcaggattctaccatatattgaacaacccaaaagcatcattattatctttgactcaatttcctcacttctccagtgtagtattaggcaatgctgctggcctaggcataatgggagagtacagaggtacaccgaggaatcaagatctatatgatgcagcaaaggcatatgctgaacaactcaaagaaaatggtgtgattaactacagtgtactagacttgacagcagaagaactagaggctatcaaacatcagcttaatccaaaagataatgatgtagagctttgagttaataaaaaatggggcaaataaatcatcatggaaaagtttgctcctgaattccatggagaagatgcaaacaacagggctactaaattcctagaatcaataaagggcaaattcacatcacccaaagatcccaagaaaaaagatagtatcatatctgtcaactcaatagatatagaagtaaccaaagaaagccctataacatcaaattcaactattatcaacccaacaaatgagacagatgatactgcagggaacaagcccaattatcaaagaaaacctctagtaagtttcaaagaagaccctacaccaagtgataatcccttttctaaactatacaaagaaaccatagaaacatttgataacaatgaagaagaatccagctattcatacgaagaaataaatgatcagacaaacgataatataacagcaagattagataggattgatgaaaaattaagtgaaatactaggaatgcttcacacattagtagtggcaagtgcaggacctacatctgctcgggatggtataagagatgccatgattggtttaagagaagaaatgatagaaaaaatcagaactgaagcattaatgaccaatgacagattagaagctatggcaagactcaggaatgaggaaagtgaaaagatggcaaaagacacatcagatgaagtgtctctcaatccaacatcagagaaattgaacaacctattggaagggaatgatagtgacaatgatctatcacttgaagatttctgattagttaccactcttcacatcaacacacaataccaacagaagaccaacaaactaaccaacccaatcatccaaccaaacatccatccgccaatcagccaaacagccaacaaaacaaccagccaatccaaaactaaccacccggaaaaaatctataatatagttacaaaaaaaggaaagggtggggcaaatatggaaacatacgtgaacaagcttcacgaaggctccacatacacagctgctgttcaatacaatgtcttagaaaaagacgatgaccctgcatcacttacaatatgggtgcccatgttccaatcatctatgccagcagatttacttataaaagaactagctaatgtcaacatactagtgaaacaaatatccacacccaagggaccttcactaagagtcatgataaactcaagaagtgcagtgctagcacaaatgcccagcaaatttaccatatgcgctaatgtgtccttggatgaaagaagcaaactagcatatgatgtaaccacaccctgtgaaatcaaggcatgtagtctaacatgcctaaaatcaaaaaatatgttgactacagttaaagatctcactatgaagacactcaaccctacacatgatattattgctttatgtgaatttgaaaacatagtaacatcaaaaaaagtcataataccaacatacctaagatccatcagtgtcagaaataaagatctgaacacacttgaaaatataacaaccactgaattcaaaaatgctatcacaaatgcaaaaatcatcccttactcaggattactattagtcatcacagtgactgacaacaaaggagcattcaaatacataaagccacaaagtcaattcatagtagatcttggagcttacctagaaaaagaaagtatatattatgttaccacaaattggaagcacacagctacacgatttgcaatcaaacccatggaagattaacctttttcctctacatcagtgtgttaattcatacaaactttctacctacattcttcacttcaccatcacaatcacaaacactctgtggttcaaccaatcaaacaaaacttatctgaagtcccagatcatcccaagtcattgtttatcagatctagtactcaaataagttaataaaaaatatacacatggacgtccatggggcaaatgcaaacatgtttgtttttcttgttttattgccactagtctctagtcagtgtgttaatcttacaaccagaactcaattaccccctgcatacactaattctttcacacgtggtgtttattaccctgacaaagttttcagatcctcagttttacattcaactcaggacttgttcttacctttcttttccaatgttacttggttccatgctatacatgtctctgggaccaatggtactaagaggtttgataaccctgtcctaccatttaatgatggtgtttattttgcttccactgagaagtctaacataataagaggctggatttttggtactactttagattcgaagacccagtccctacttattgttaataacgctactaatgttgttattaaagtctgtgaatttcaattttgtaatgatccatttttgggtgtttattaccacaaaaacaacaaaagttggatggaaagtgagttcagagtttattctagtgcgaataattgcacttttgaatatgtctctcagccttttcttatggaccttgaaggaaaacagggtaatttcaaaaatcttagggaatttgtgtttaagaatattgatggttattttaaaatatattctaagcacacgcctattaatttagtgcgtgatctccctcagggtttttcggctttagaaccattggtagatttgccaataggtattaacatcactaggtttcaaactttacttgctttacatagaagttatttgactcctggtgattcttcttcaggttggacagctggtgctgcagcttattatgtgggttatcttcaacctaggacttttctattaaaatataatgaaaatggaaccattacagatgctgtagactgtgcacttgaccctctctcagaaacaaagtgtacgttgaaatccttcactgtagaaaaaggaatctatcaaacttctaactttagagtccaaccaacagaatctattgttagatttcctaatattacaaacttgtgcccttttggtgaagtttttaacgccaccagatttgcatctgtttatgcttggaacaggaagagaatcagcaactgtgttgctgattattctgtcctatataattccgcatcattttccacttttaagtgttatggagtgtctcctactaaattaaatgatctctgctttactaatgtctatgcagattcatttgtaattagaggtgatgaagtcagacaaatcgctccagggcaaactggaaagattgctgattataattataaattaccagatgattttacaggctgcgttatagcttggaattctaacaatcttgattctaaggttggtggtaattataattacctgtatagattgtttaggaagtctaatctcaaaccttttgagagagatatttcaactgaaatctatcaggccggtagcacaccttgtaatggtgttgaaggttttaattgttactttcctttacaatcatatggtttccaacccactaatggtgttggttaccaaccatacagagtagtagtactttcttttgaacttctacatgcaccagcaactgtttgtggacctaaaaagtctactaatttggttaaaaacaaatgtgtcaatttcaacttcaatggtttaacaggcacaggtgttcttactgagtctaacaaaaagtttctgcctttccaacaatttggcagagacattgctgacactactgatgctgtccgtgatccacagacacttgagattcttgacattacaccatgttcttttggtggtgtcagtgttataacaccaggaacaaatacttctaaccaggttgctgttctttatcaggatgttaactgcacagaagtccctgttgctattcatgcagatcaacttactcctacttggcgtgtttattctacaggttctaatgtttttcaaacacgtgcaggctgtttaataggggctgaacatgtcaacaactcatatgagtgtgacatacccattggtgcaggtatatgcgctagttatcagactcagactaattctcgtagtgtagctagtcaatccatcattgcctacactatgtcacttggtgcagaaaattcagttgcttactctaataactctattgccatacccacaaattttactattagtgttaccacagaaattctaccagtgtctatgaccaagacatcagtagattgtacaatgtacatttgtggtgattcaactgaatgcagcaatcttttgttgcaatatggcagtttttgtacacaattaaaccgtgctttaactggaatagctgttgaacaagacaaaaacacccaagaagtttttgcacaagtcaaacaaatttacaaaacaccaccaattaaagattttggtggttttaatttttcacaaatattaccagatccatcaaaaccaagcaagaggtcatttattgaagatctacttttcaacaaagtgacacttgcagatgctggcttcatcaaacaatatggtgattgccttggtgatattgctgctagagacctcatttgtgcacaaaagtttaacggccttactgttttgccacctttgctcacagatgaaatgattgctcaatacacttctgcactgttagcgggtacaatcacttctggttggacctttggtgcaggtgctgcattacaaataccatttgctatgcaaatggcttataggtttaatggtattggagttacacagaatgttctctatgagaaccaaaaattgattgccaaccaatttaatagtgctattggcaaaattcaagactcactttcttccacagcaagtgcacttggaaaacttcaagatgtggtcaaccaaaatgcacaagctttaaacacgcttgttaaacaacttagctccaattttggtgcaatttcaagtgttttaaatgatatcctttcacgtcttgacaaagttgaggctgaagtgcaaattgataggttgatcacaggcagacttcaaagtttgcagacatatgtgactcaacaattaattagagctgcagaaatcagagcttctgctaatcttgctgctactaaaatgtcagagtgtgtacttggacaatcaaaaagagttgatttttgtggaaagggctatcatcttatgtccttccctcagtcagcacctcatggtgtagtcttcttgcatgtgacttatgtccctgcacaagaaaagaacttcacaactgctcctgccatttgtcatgatggaaaagcacactttcctcgtgaaggtgtctttgtttcaaatggcacacactggtttgtaacacaaaggaatttttatgaaccacaaatcattactacagacaacacatttgtgtctggtaactgtgatgttgtaataggaattgtcaacaacacagtttatgatcctttgcaacctgaattagactcattcaaggaggagttagataaatattttaagaatcatacatcaccagatgttgatttaggtgacatctctggcattaatgcttcagttgtaaacattcaaaaagaaattgaccgcctcaatgaggttgccaagaatttaaatgaatctctcatcgatctccaagaacttggaaagtatgagcagtatataaaatggccatggtacatttggctaggttttatagctggcttgattgccatagtaatggtgacaattatgctttgctgtatgaccagttgctgtagttgtctcaagggctgttgttcttgtggatcctgctgcaaatttgatgaagacgacggactgctcctatactgtaaggccagaagcacaccaatcacactaagcaaggatcaactgagtggtataaataatattgcatttagtaactaaataaaaatagcacctaatcatgttcttacaatggtttactatctgctcatagacaacccatctatcattggattttcttaaaatctgaacttcatcgaaactcttatctataaaccatctcacttacactatttaagtagattcctagtttatagttatataaaacacaattgaatgccagtcgaccttaccatctgtaaaaatgaaaactggggcaaatatgtcacgaaggaatccttgcaaatttgaaattcgaggtcattgcttaaatggtaagaggtgtcattttagtcataattattttgaatggccaccccatgcactgcttgtaagacaaaactttatgttaaacagaatacttaagtctatggataaaagtatagataccttatcagaaataagtggagctgcagagttggacagaacagaagagtatgctcttggtgtagttggagtgctagagagttatataggatcaataaacaatataactaaacaatcagcatgtgttgccatgagcaaactcctcactgaactcaatagtgatgatatcaaaaagctgagggacaatgaagagctaaattcacccaagataagagtgtacaatactgtcatatcatatattgaaagcaacaggaaaaacaataaacaaactatccatctgttaaaaagattgccagcagacgtattgaagaaaaccatcaaaaacacattggatatccataagagcataaccatcaacaacccaaaagaatcaactgttagtgatacaaatgaccatgccaaaaataatgatactacctgacaaatatccttgtagtataacttccatactaataacaagtagatgtagagttactatgtataatcaaaagaacacactatatttcaatcaaaacaacccaaataaccatatgtactcaccgaatcaaacattcaatgaaatccattggacctctcaagaattgattgacacaattcaaaattttctacaacatctaggtattattgaggatatatatacaatatatatattagtgtcataacactcaattctaacactcaccacatcgttacattattaattcaaacaattcaagttgtgggacaaaatggatcccattattaatggaaattctgctaatgtttatctaaccgatagttatttaaaaggtgttatctctttctcagagtgtaatgctttaggaagttacatattcaatggtccttatctcaaaaatgattataccaacttaattagtagacaaaatccattaatagaacacatgaatctaaagaaactaaatataacacagtccttaatatctaagtatcataaaggtgaaataaaattagaagaacctacttattttcagtcattacttatgacatacaagagtatgacctcgtcagaacagattgctaccactaatttacttaaaaagataataagaagagctatagaaataagtgatgtcaaagtctatgctatattgaataaactagggcttaaagaaaaggacaagattaaatccaacaatggacaagatgaagacaactcagttattacgaccataatcaaagatgatatactttcagctgttaaagataatcaatctcatcttaaagcagacaaaaatcactctacaaaacaaaaagacacaatcaaaacaacactcttgaagaaattgatgtgttcaatgcaacatcctccatcatggttaatacattggtttaacttatacacaaaattaaacaacatattaacacagtatcgatcaaatgaggtaaaaaaccatgggtttacattgatagataatcaaactcttagtggatttcaatttattttgaaccaatatggttgtatagtttatcataaggaactcaaaagaattactgtgacaacctataatcaattcttgacatggaaagatattagccttagtagattaaatgtttgtttaattacatggattagtaactgcttgaacacattaaataaaagcttaggcttaagatgcggattcaataatgttatcttgacacaactattcctttatggagattgtatactaaagctatttcacaatgaggggttctacataataaaagaggtagagggatttattatgtctctaattttaaatataacagaagaagatcaattcagaaaacgattttataatagtatgctcaacaacatcacagatgctgctaataaagctcagaaaaatctgctatcaagagtatgtcatacattattagataagacagtgtccgataatataataaatggcagatggataattctattaagtaagttccttaaattaattaagcttgcaggtgacaataaccttaacaatctgagtgaactatattttttgttcagaatatttggacacccaatggtagatgaaagacaagccatggatgctgttaaaattaattgcaatgagaccaaattttacttgttaagcagtctgagtatgttaagaggtgcctttatatatagaattataaaagggtttgtaaataattacaacagatggcctactttaagaaatgctattgttttacccttaagatggttaacttactataaactaaacacttatccttctttgttggaacttacagaaagagatttgattgtgttatcaggactacgtttctatcgtgagtttcggttgcctaaaaaagtggatcttgaaatgattataaatgataaagctatatcacctcctaaaaatttgatatggactagtttccctagaaattacatgccatcacacatacaaaactatatagaacatgaaaaattaaaattttccgagagtgataaatcaagaagagtattagagtattatttaagagataacaaattcaatgaatgtgatttatacaactgtgtagttaatcaaagttatctcaacaaccctaatcatgtggtatcattgacaggcaaagaaagagaactcagtgtaggtagaatgtttgcaatgcaaccgggaatgttcagacaggttcaaatattggcagagaaaatgatagctgaaaacattttacaattctttcctgaaagtcttacaagatatggtgatctagaactacaaaaaatattagaattgaaagcaggaataagtaacaaatcaaatcgctacaatgataattacaacaattacattagtaagtgctctatcatcacagatctcagcaaattcaatcaagcatttcgatatgaaacgtcatgtatttgtagtgatgtgctggatgaactgcatggtgtacaatctctattttcctggttacatttaactattcctcatgtcacaataatatgcacatataggcatgcacccccctatataggagatcatattgtagatcttaacaatgtagatgaacaaagtggattatatagatatcacatgggtggcatcgaagggtggtgtcaaaaactgtggaccatagaagctatatcactattggatctaatatctctcaaagggaaattctcaattactgctttaattaatggtgacaatcaatcaatagatataagcaaaccaatcagactcatggaaggtcaaactcatgctcaagcagattatttgctagcattaaatagccttaaattactgtataaagagtatgcaggcataggccacaaattaaaaggaactgagacttatatatcacgagatatgcaatttatgagtaaaacaattcaacataacggtgtatattacccagctagtataaagaaagtcctaagagtgggaccgtggataaacactatacttgatgatttcaaagtgagtctagaatctataggtagtttgacacaagaattagaatatagaggtgaaagtctattatgcagtttaatatttagaaatgtatggttatataatcagattgctctacaattaaaaaatcatgcattatgtaacaataaactatatttggacatattaaaggttctgaaacacttaaaaaccttttttaatcttgataatattgatacagcattaacattgtatatgaatttacccatgttatttggtggtggtgatcccaacttgttatatcgaagtttctatagaagaactcctgacttcctcacagaggctatagttcactctgtgttcatacttagttattatacaaaccatgacttaaaagataaacttcaagatctgtcagatgatagattgaataagttcttaacatgcataatcacgtttgacaaaaaccctaatgctgaattcgtaacattgatgagagatcctcaagctttagggtctgagagacaagctaaaattactagcgaaatcaatagactggcagttacagaggttttgagtacagctccaaacaaaatattctccaaaagtgcacaacattatactactacagagatagatctaaatgatattatgcaaaatatagaacctacatatcctcatgggctaagagttgtttatgaaagtttacccttttataaagcagagaaaatagtaaatcttatatcaggtacaaaatctataactaacatactggaaaaaacttctgccatagacttaacagatattgatagagccactgagatgatgaggaaaaacataactttgcttataaggatacttccattggattgtaacagagataaaagagagatattgagtatggaaaacctaagtattactgaattaagcaaatatgttagggaaagatcttggtctttatccaatatagttggtgttacatcacccagtatcatgtatacaatggacatcaaatatactacaagcactatatctagtggcataattatagagaaatataatgttaacagtttaacacgtggtgagagaggacccactaaaccatgggttggttcatctacacaagagaaaaaaacaatgccagtttataatagacaagtcttaaccaaaaaacagagagatcaaatagatctattagcaaaattggattgggtgtatgcatctatagataacaaggatgaattcatggaagaactcagcataggaacccttgggttaacatatgaaaaggccaagaaattatttccacaatatttaagtgtcaattatttgcatcgccttacagtcagtagtagaccatgtgaattccctgcatcaataccagcttatagaacaacaaattatcactttgacactagccctattaatcgcatattaacagaaaagtatggtgatgaagatattgacatagtattccaaaactgtataagctttggccttagtttaatgtcagtagtagaacaatttactaatgtatgtcctaacagaattattctcatacctaagcttaatgagatacatttgatgaaacctcccatattcacaggtgatgttgatattcacaagttaaaacaagtgatacaaaaacagcatatgtttttaccagacaaaataagtttgactcaatatgtggaattattcttaagtaataaaacactcaaatctggatctcatgttaattctaatttaatattggcacataaaatatctgactattttcataatacttacattttaagtactaatttagctggacattggattctgattatacaacttatgaaagattctaaaggtatttttgaaaaagattggggagagggatatataactgatcatatgtttattaatttgaaagttttcttcaatgcttataagacctatctcttgtgttttcataaaggttatggcaaagcaaagctggagtgtgatatgaacacttcagatcttctatgtgtattggaattaatagacagtagttattggaagtctatgtctaaggtatttttagaacaaaaagttatcaaatacattcttagccaagatgcaagtttacatagagtaaaaggatgtcatagcttcaaattatggtttcttaaacgtcttaatgtagcagaattcacagtttgcccttgggttgttaacatagattatcatccaacacatatgaaagcaatattaacttatatagatcttgttagaatgggattgataaatatagatagaatacacattaaaaataaacacaaattcaatgatgaattttatacttctaatctcttctacattaattataacttctcagataatactcatctattaactaaacatataaggattgctaattctgaattagaaaataattacaacaaattatatcatcctacaccagaaaccctagagaatatactagccaatccgattaaaagtaatgacaaaaagacactgaatgactattgtataggtaaaaatgttgactcaataatgttaccattgttatctaataagaagcttattaaatcgtctgcaatgattagaaccaattacagcaaacaagatttgtataatttattccctatggttgtgattgatagaattatagatcattcaggcaatacagccaaatccaaccaactttacactactacttcccaccaaatatctttagtgcacaatagcacatcactttactgcatgcttccttggcatcatattaatagattcaattttgtatttagttctacaggttgtaaaattagtatagagtatattttaaaagatcttaaaattaaagatcccaattgtatagcattcataggtgaaggagcagggaatttattattgcgtacagtagtggaacttcatcctgacataagatatatttacagaagtctgaaagattgcaatgatcatagtttacctattgagtttttaaggctgtacaatggacatatcaacattgattatggtgaaaatttgaccattcctgctacagatgcaaccaacaacattcattggtcttatttacatataaagtttgctgaacctatcagtctttttgtctgtgatgccgaattgtctgtaacagtcaactggagtaaaattataatagaatggagcaagcatgtaagaaagtgcaagtactgttcctcagttaataaatgtatgttaatagtaaaatatcatgctcaagatgatattgatttcaaattagacaatataactatattaaaaacttatgtatgcttaggcagtaagttaaagggatcggaggtttacttagtccttacaataggtcctgcgaatatattcccagtatttaatgtagtacaaaatgctaaattgatactatcaagaaccaaaaatttcatcatgcctaagaaagctgataaagagtctattgatgcaaatattaaaagtttgataccctttctttgttaccctataacaaaaaaaggaattaatactgcattgtcaaaactaaagagtgttgttagtggagatatactatcatattctatagctggacgtaatgaagttttcagcaataaacttataaatcataagcatatgaacatcttaaaatggttcaatcatgttttaaatttcagatcaacagaactaaactataaccatttatatatggtagaatctacatatccttacctaagtgaattgttaaacagcttgacaaccaatgaacttaaaaaactgattaaaatcacaggtagtctgttatacaactttcataatgaataatgaataaagatcttataataaaaattcccatagctatacactaacactgtattcaattatagttattaaaaattaaaaatcgtacgattttttaaataacttttagtgaactaatcctaaagttatcattttaatcttggaggaataaatttaaaccctaatctaattggtttatatgtgtattaactaaattacgagatattagtttttgacactttttttctcgt

SEQ ID NO: 89 - DNA, 15941 bp, Artificial Sequence
  Description of Artificial Sequence: Synthetic polynucleotide
acgcgaaaaaatgcgtacaacaaacttgcataaaccaaaaaaatggggcaaataagaatttgataagtaccacttaaatttaactcccttgcttagcgatgggttcgaattcgctatcgatgataaaagtacgtctacaaaatctatttgataatgatgaagtagcgctactaaaaataacgtgttatacggataaactaatacatctaacgaatgcgctagcgaaagcggtaatacatacgataaaactaaatggtatagtatttgtacatgtaataacgtcgtcggatatatgtccgaataataatatagtagtaaaatcgaattttacgacgatgccggtactacaaaatggtggttatatatgggaaatgatggaactaacgcattgttcgcaaccgaatggtctactagatgataattgtgaaataaaattttcgaaaaaactatcggattcgacgatgacgaattatatgaatcaactatcggaactactaggttttgatctaaatccgtaaattataattaatatcaactagcaaatcaatgtcactaacaccattagttaatataaaacttaacagaagacaaaaatggggcaaataaatcaattcagccaacccaaccatggatacgacgcataatgataatacgccgcaacgtctaatgataacggatatgcgtccgctatcgctagaaacgataataacgtcgctaacgcgtgatataataacgcataaatttatatatctaataaatcatgaatgtatagtacgtaaactagatgaacgtcaagcgacgtttacgtttctagtaaattatgaaatgaaactactacataaagtaggttcgacgaaatataaaaaatatacggaatataatacgaaatatggtacgtttccgatgccgatatttataaatcatgatggttttctagaatgtataggtataaaaccgacgaaacatacgccgataatatataaatatgatctaaatccgtaaatttcaacacaatattcacacaatctaaaacaacaactctatgcataactatactccatagtccagatggagcctgaaaattatagtaatttaaaattaaggagagatataagatagaagatggggcaaatacaaagatggctcttagcaaagtcaagttgaatgatacactcaacaaagatcaacttctgtcatccagcaaatacaccatccaacggagcacaggagatagtattgatactcctaattatgatgtgcagaaacacatcaataagttatgtggcatgttattaatcacagaagatgctaatcataaattcactgggttaataggtatgttatatgcgatgtctaggttaggaagagaagacaccataaaaatactcagagatgcgggatatcatgtaaaagcaaatggagtagatgtaacaacacatcgtcaagacattaatggaaaagaaatgaaatttgaagtgttaacattggcaagcttaacaactgaaattcaaatcaacattgagatagaatctagaaaatcctacaaaaaaatgctaaaagaaatgggagaggtagctccagaatacaggcatgactctcctgattgtgggatgataatattatgtatagcagcattagtaataactaaattagcagcaggggacagatctggtcttacagccgtgattaggagagctaataatgtcctaaaaaatgaaatgaaacgttacaaaggcttactacccaaggacatagccaacagcttctatgaagtgtttgaaaaacatccccactttatagatgtttttgttcattttggtatagcacaatcttctaccagaggtggcagtagagttgaagggatttttgcaggattgtttatgaatgcctatggtgcagggcaagtgatgttacggtggggagtcttagcaaaatcagttaaaaatattatgttaggacatgctagtgtgcaagcagaaatggaacaagttgttgaggtttatgaatatgcccaaaaattgggtggtgaagcaggattctaccatatattgaacaacccaaaagcatcattattatctttgactcaatttcctcacttctccagtgtagtattaggcaatgctgctggcctaggcataatgggagagtacagaggtacaccgaggaatcaagatctatatgatgcagcaaaggcatatgctgaacaactcaaagaaaatggtgtgattaactacagtgtactagacttgacagcagaagaactagaggctatcaaacatcagcttaatccaaaagataatgatgtagagctttgagttaataaaaaatggggcaaataaatcatcatggaaaagtttgctcctgaattccatggagaagatgcaaacaacagggctactaaattcctagaatcaataaagggcaaattcacatcacccaaagatcccaagaaaaaagatagtatcatatctgtcaactcaatagatatagaagtaaccaaagaaagccctataacatcaaattcaactattatcaacccaacaaatgagacagatgatactgcagggaacaagcccaattatcaaagaaaacctctagtaagtttcaaagaagaccctacaccaagtgataatcccttttctaaactatacaaagaaaccatagaaacatttgataacaatgaagaagaatccagctattcatacgaagaaataaatgatcagacaaacgataatataacagcaagattagataggattgatgaaaaattaagtgaaatactaggaatgcttcacacattagtagtggcaagtgcaggacctacatctgctcgggatggtataagagatgccatgattggtttaagagaagaaatgatagaaaaaatcagaactgaagcattaatgaccaatgacagattagaagctatggcaagactcaggaatgaggaaagtgaaaagatggcaaaagacacatcagatgaagtgtctctcaatccaacatcagagaaattgaacaacctattggaagggaatgatagtgacaatgatctatcacttgaagatttctgattagttaccactcttcacatcaacacacaataccaacagaagaccaacaaactaaccaacccaatcatccaaccaaacatccatccgccaatcagccaaacagccaacaaaacaaccagccaatccaaaactaaccacccggaaaaaatctataatatagttacaaaaaaaggaaagggtggggcaaatatggaaacatacgtgaacaagcttcacgaaggctccacatacacagctgctgttcaatacaatgtcttagaaaaagacgatgaccctgcatcacttacaatatgggtgcccatgttccaatcatctatgccagcagatttacttataaaagaactagctaatgtcaacatactagtgaaacaaatatccacacccaagggaccttcactaagagtcatgataaactcaagaagtgcagtgctagcacaaatgcccagcaaatttaccatatgcgctaatgtgtccttggatgaaagaagcaaactagcatatgatgtaaccacaccctgtgaaatcaaggcatgtagtctaacatgcctaaaatcaaaaaatatgttgactacagttaaagatctcactatgaagacactcaaccctacacatgatattattgctttatgtgaatttgaaaacatagtaacatcaaaaaaagtcataataccaacatacctaagatccatcagtgtcagaaataaagatctgaacacacttgaaaatataacaaccactgaattcaaaaatgctatcacaaatgcaaaaatcatcccttactcaggattactattagtcatcacagtgactgacaacaaaggagcattcaaatacataaagccacaaagtcaattcatagtagatcttggagcttacctagaaaaagaaagtatatattatgttaccacaaattggaagcacacagctacacgatttgcaatcaaacccatggaagattaacctttttcctctacatcagtgtgttaattcatacaaactttctacctacattcttcacttcaccatcacaatcacaaacactctgtggttcaaccaatcaaacaaaacttatctgaagtcccagatcatcccaagtcattgtttatcagatctagtactcaaataagttaataaaaaatatacacatggacgtccatggggcaaatgcaaacatgtttgtttttcttgttttattgccactagtctctagtcagtgtgttaatcttacaaccagaactcaattaccccctgcatacactaattctttcacacgtggtgtttattaccctgacaaagttttcagatcctcagttttacattcaactcaggacttgttcttacctttcttttccaatgttacttggttccatgctatacatgtctctgggaccaatggtactaagaggtttgataaccctgtcctaccatttaatgatggtgtttattttgcttccactgagaagtctaacataataagaggctggatttttggtactactttagattcgaagacccagtccctacttattgttaataacgctactaatgttgttattaaagtctgtgaatttcaattttgtaatgatccatttttgggtgtttattaccacaaaaacaacaaaagttggatggaaagtgagttcagagtttattctagtgcgaataattgcacttttgaatatgtctctcagccttttcttatggaccttgaaggaaaacagggtaatttcaaaaatcttagggaatttgtgtttaagaatattgatggttattttaaaatatattctaagcacacgcctattaatttagtgcgtgatctccctcagggtttttcggctttagaaccattggtagatttgccaataggtattaacatcactaggtttcaaactttacttgctttacatagaagttatttgactcctggtgattcttcttcaggttggacagctggtgctgcagcttattatgtgggttatcttcaacctaggacttttctattaaaatataatgaaaatggaaccattacagatgctgtagactgtgcacttgaccctctctcagaaacaaagtgtacgttgaaatccttcactgtagaaaaaggaatctatcaaacttctaactttagagtccaaccaacagaatctattgttagatttcctaatattacaaacttgtgcccttttggtgaagtttttaacgccaccagatttgcatctgtttatgcttggaacaggaagagaatcagcaactgtgttgctgattattctgtcctatataattccgcatcattttccacttttaagtgttatggagtgtctcctactaaattaaatgatctctgctttactaatgtctatgcagattcatttgtaattagaggtgatgaagtcagacaaatcgctccagggcaaactggaaagattgctgattataattataaattaccagatgattttacaggctgcgttatagcttggaattctaacaatcttgattctaaggttggtggtaattataattacctgtatagattgtttaggaagtctaatctcaaaccttttgagagagatatttcaactgaaatctatcaggccggtagcacaccttgtaatggtgttgaaggttttaattgttactttcctttacaatcatatggtttccaacccactaatggtgttggttaccaaccatacagagtagtagtactttcttttgaacttctacatgcaccagcaactgtttgtggacctaaaaagtctactaatttggttaaaaacaaatgtgtcaatttcaacttcaatggtttaacaggcacaggtgttcttactgagtctaacaaaaagtttctgcctttccaacaatttggcagagacattgctgacactactgatgctgtccgtgatccacagacacttgagattcttgacattacaccatgttcttttggtggtgtcagtgttataacaccaggaacaaatacttctaaccaggttgctgttctttatcaggatgttaactgcacagaagtccctgttgctattcatgcagatcaacttactcctacttggcgtgtttattctacaggttctaatgtttttcaaacacgtgcaggctgtttaataggggctgaacatgtcaacaactcatatgagtgtgacatacccattggtgcaggtatatgcgctagttatcagactcagactaattctcgtagtgtagctagtcaatccatcattgcctacactatgtcacttggtgcagaaaattcagttgcttactctaataactctattgccatacccacaaattttactattagtgttaccacagaaattctaccagtgtctatgaccaagacatcagtagattgtacaatgtacatttgtggtgattcaactgaatgcagcaatcttttgttgcaatatggcagtttttgtacacaattaaaccgtgctttaactggaatagctgttgaacaagacaaaaacacccaagaagtttttgcacaagtcaaacaaatttacaaaacaccaccaattaaagattttggtggttttaatttttcacaaatattaccagatccatcaaaaccaagcaagaggtcatttattgaagatctacttttcaacaaagtgacacttgcagatgctggcttcatcaaacaatatggtgattgccttggtgatattgctgctagagacctcatttgtgcacaaaagtttaacggccttactgttttgccacctttgctcacagatgaaatgattgctcaatacacttctgcactgttagcgggtacaatcacttctggttggacctttggtgcaggtgctgcattacaaataccatttgctatgcaaatggcttataggtttaatggtattggagttacacagaatgttctctatgagaaccaaaaattgattgccaaccaatttaatagtgctattggcaaaattcaagactcactttcttccacagcaagtgcacttggaaaacttcaagatgtggtcaaccaaaatgcacaagctttaaacacgcttgttaaacaacttagctccaattttggtgcaatttcaagtgttttaaatgatatcctttcacgtcttgacaaagttgaggctgaagtgcaaattgataggttgatcacaggcagacttcaaagtttgcagacatatgtgactcaacaattaattagagctgcagaaatcagagcttctgctaatcttgctgctactaaaatgtcagagtgtgtacttggacaatcaaaaagagttgatttttgtggaaagggctatcatcttatgtccttccctcagtcagcacctcatggtgtagtcttcttgcatgtgacttatgtccctgcacaagaaaagaacttcacaactgctcctgccatttgtcatgatggaaaagcacactttcctcgtgaaggtgtctttgtttcaaatggcacacactggtttgtaacacaaaggaatttttatgaaccacaaatcattactacagacaacacatttgtgtctggtaactgtgatgttgtaataggaattgtcaacaacacagtttatgatcctttgcaacctgaattagactcattcaaggaggagttagataaatattttaagaatcatacatcaccagatgttgatttaggtgacatctctggcattaatgcttcagttgtaaacattcaaaaagaaattgaccgcctcaatgaggttgccaagaatttaaatgaatctctcatcgatctccaagaacttggaaagtatgagcagtatataaaatggccatggtacatttggctaggttttatagctggcttgattgccatagtaatggtgacaattatgctttgctgtatgaccagttgctgtagttgtctcaagggctgttgttcttgtggatcctgctgcaaatttgatgaagacgacggactgctcctatactgtaaggccagaagcacaccaatcacactaagcaaggatcaactgagtggtataaataatattgcatttagtaactaaataaaaatagcacctaatcatgttcttacaatggtttactatctgctcatagacaacccatctatcattggattttcttaaaatctgaacttcatcgaaactcttatctataaaccatctcacttacactatttaagtagattcctagtttatagttatataaaacacaattgaatgccagtcgaccttaccatctgtaaaaatgaaaactggggcaaatatgtcacgaaggaatccttgcaaatttgaaattcgaggtcattgcttaaatggtaagaggtgtcattttagtcataattattttgaatggccaccccatgcactgcttgtaagacaaaactttatgttaaacagaatacttaagtctatggataaaagtatagataccttatcagaaataagtggagctgcagagttggacagaacagaagagtatgctcttggtgtagttggagtgctagagagttatataggatcaataaacaatataactaaacaatcagcatgtgttgccatgagcaaactcctcactgaactcaatagtgatgatatcaaaaagctgagggacaatgaagagctaaattcacccaagataagagtgtacaatactgtcatatcatatattgaaagcaacaggaaaaacaataaacaaactatccatctgttaaaaagattgccagcagacgtattgaagaaaaccatcaaaaacacattggatatccataagagcataaccatcaacaacccaaaagaatcaactgttagtgatacaaatgaccatgccaaaaataatgatactacctgacaaatatccttgtagtataacttccatactaataacaagtagatgtagagttactatgtataatcaaaagaacacactatatttcaatcaaaacaacccaaataaccatatgtactcaccgaatcaaacattcaatgaaatccattggacctctcaagaattgattgacacaattcaaaattttctacaacatctaggtattattgaggatatatatacaatatatatattagtgtcataacactcaattctaacactcaccacatcgttacattattaattcaaacaattcaagttgtgggacaaaatggatcccattattaatggaaattctgctaatgtttatctaaccgatagttatttaaaaggtgttatctctttctcagagtgtaatgctttaggaagttacatattcaatggtccttatctcaaaaatgattataccaacttaattagtagacaaaatccattaatagaacacatgaatctaaagaaactaaatataacacagtccttaatatctaagtatcataaaggtgaaataaaattagaagaacctacttattttcagtcattacttatgacatacaagagtatgacctcgtcagaacagattgctaccactaatttacttaaaaagataataagaagagctatagaaataagtgatgtcaaagtctatgctatattgaataaactagggcttaaagaaaaggacaagattaaatccaacaatggacaagatgaagacaactcagttattacgaccataatcaaagatgatatactttcagctgttaaagataatcaatctcatcttaaagcagacaaaaatcactctacaaaacaaaaagacacaatcaaaacaacactcttgaagaaattgatgtgttcaatgcaacatcctccatcatggttaatacattggtttaacttatacacaaaattaaacaacatattaacacagtatcgatcaaatgaggtaaaaaaccatgggtttacattgatagataatcaaactcttagtggatttcaatttattttgaaccaatatggttgtatagtttatcataaggaactcaaaagaattactgtgacaacctataatcaattcttgacatggaaagatattagccttagtagattaaatgtttgtttaattacatggattagtaactgcttgaacacattaaataaaagcttaggcttaagatgcggattcaataatgttatcttgacacaactattcctttatggagattgtatactaaagctatttcacaatgaggggttctacataataaaagaggtagagggatttattatgtctctaattttaaatataacagaagaagatcaattcagaaaacgattttataatagtatgctcaacaacatcacagatgctgctaataaagctcagaaaaatctgctatcaagagtatgtcatacattattagataagacagtgtccgataatataataaatggcagatggataattctattaagtaagttccttaaattaattaagcttgcaggtgacaataaccttaacaatctgagtgaactatattttttgttcagaatatttggacacccaatggtagatgaaagacaagccatggatgctgttaaaattaattgcaatgagaccaaattttacttgttaagcagtctgagtatgttaagaggtgcctttatatatagaattataaaagggtttgtaaataattacaacagatggcctactttaagaaatgctattgttttacccttaagatggttaacttactataaactaaacacttatccttctttgttggaacttacagaaagagatttgattgtgttatcaggactacgtttctatcgtgagtttcggttgcctaaaaaagtggatcttgaaatgattataaatgataaagctatatcacctcctaaaaatttgatatggactagtttccctagaaattacatgccatcacacatacaaaactatatagaacatgaaaaattaaaattttccgagagtgataaatcaagaagagtattagagtattatttaagagataacaaattcaatgaatgtgatttatacaactgtgtagttaatcaaagttatctcaacaaccctaatcatgtggtatcattgacaggcaaagaaagagaactcagtgtaggtagaatgtttgcaatgcaaccgggaatgttcagacaggttcaaatattggcagagaaaatgatagctgaaaacattttacaattctttcctgaaagtcttacaagatatggtgatctagaactacaaaaaatattagaattgaaagcaggaataagtaacaaatcaaatcgctacaatgataattacaacaattacattagtaagtgctctatcatcacagatctcagcaaattcaatcaagcatttcgatatgaaacgtcatgtatttgtagtgatgtgctggatgaactgcatggtgtacaatctctattttcctggttacatttaactattcctcatgtcacaataatatgcacatataggcatgcacccccctatataggagatcatattgtagatcttaacaatgtagatgaacaaagtggattatatagatatcacatgggtggcatcgaagggtggtgtcaaaaactgtggaccatagaagctatatcactattggatctaatatctctcaaagggaaattctcaattactgctttaattaatggtgacaatcaatcaatagatataagcaaaccaatcagactcatggaaggtcaaactcatgctcaagcagattatttgctagcattaaatagccttaaattactgtataaagagtatgcaggcataggccacaaattaaaaggaactgagacttatatatcacgagatatgcaatttatgagtaaaacaattcaacataacggtgtatattacccagctagtataaagaaagtcctaagagtgggaccgtggataaacactatacttgatgatttcaaagtgagtctagaatctataggtagtttgacacaagaattagaatatagaggtgaaagtctattatgcagtttaatatttagaaatgtatggttatataatcagattgctctacaattaaaaaatcatgcattatgtaacaataaactatatttggacatattaaaggttctgaaacacttaaaaaccttttttaatcttgataatattgatacagcattaacattgtatatgaatttacccatgttatttggtggtggtgatcccaacttgttatatcgaagtttctatagaagaactcctgacttcctcacagaggctatagttcactctgtgttcatacttagttattatacaaaccatgacttaaaagataaacttcaagatctgtcagatgatagattgaataagttcttaacatgcataatcacgtttgacaaaaaccctaatgctgaattcgtaacattgatgagagatcctcaagctttagggtctgagagacaagctaaaattactagcgaaatcaatagactggcagttacagaggttttgagtacagctccaaacaaaatattctccaaaagtgcacaacattatactactacagagatagatctaaatgatattatgcaaaatatagaacctacatatcctcatgggctaagagttgtttatgaaagtttacccttttataaagcagagaaaatagtaaatcttatatcaggtacaaaatctataactaacatactggaaaaaacttctgccatagacttaacagatattgatagagccactgagatgatgaggaaaaacataactttgcttataaggatacttccattggattgtaacagagataaaagagagatattgagtatggaaaacctaagtattactgaattaagcaaatatgttagggaaagatcttggtctttatccaatatagttggtgttacatcacccagtatcatgtatacaatggacatcaaatatactacaagcactatatctagtggcataattatagagaaatataatgttaacagtttaacacgtggtgagagaggacccactaaaccatgggttggttcatctacacaagagaaaaaaacaatgccagtttataatagacaagtcttaaccaaaaaacagagagatcaaatagatctattagcaaaattggattgggtgtatgcatctatagataacaaggatgaattcatggaagaactcagcataggaacccttgggttaacatatgaaaaggccaagaaattatttccacaatatttaagtgtcaattatttgcatcgccttacagtcagtagtagaccatgtgaattccctgcatcaataccagcttatagaacaacaaattatcactttgacactagccctattaatcgcatattaacagaaaagtatggtgatgaagatattgacatagtattccaaaactgtataagctttggccttagtttaatgtcagtagtagaacaatttactaatgtatgtcctaacagaattattctcatacctaagcttaatgagatacatttgatgaaacctcccatattcacaggtgatgttgatattcacaagttaaaacaagtgatacaaaaacagcatatgtttttaccagacaaaataagtttgactcaatatgtggaattattcttaagtaataaaacactcaaatctggatctcatgttaattctaatttaatattggcacataaaatatctgactattttcataatacttacattttaagtactaatttagctggacattggattctgattatacaacttatgaaagattctaaaggtatttttgaaaaagattggggagagggatatataactgatcatatgtttattaatttgaaagttttcttcaatgcttataagacctatctcttgtgttttcataaaggttatggcaaagcaaagctggagtgtgatatgaacacttcagatcttctatgtgtattggaattaatagacagtagttattggaagtctatgtctaaggtatttttagaacaaaaagttatcaaatacattcttagccaagatgcaagtttacatagagtaaaaggatgtcatagcttcaaattatggtttcttaaacgtcttaatgtagcagaattcacagtttgcccttgggttgttaacatagattatcatccaacacatatgaaagcaatattaacttatatagatcttgttagaatgggattgataaatatagatagaatacacattaaaaataaacacaaattcaatgatgaattttatacttctaatctcttctacattaattataacttctcagataatactcatctattaactaaacatataaggattgctaattctgaattagaaaataattacaacaaattatatcatcctacaccagaaaccctagagaatatactagccaatccgattaaaagtaatgacaaaaagacactgaatgactattgtataggtaaaaatgttgactcaataatgttaccattgttatctaataagaagcttattaaatcgtctgcaatgattagaaccaattacagcaaacaagatttgtataatttattccctatggttgtgattgatagaattatagatcattcaggcaatacagccaaatccaaccaactttacactactacttcccaccaaatatctttagtgcacaatagcacatcactttactgcatgcttccttggcatcatattaatagattcaattttgtatttagttctacaggttgtaaaattagtatagagtatattttaaaagatcttaaaattaaagatcccaattgtatagcattcataggtgaaggagcagggaatttattattgcgtacagtagtggaacttcatcctgacataagatatatttacagaagtctgaaagattgcaatgatcatagtttacctattgagtttttaaggctgtacaatggacatatcaacattgattatggtgaaaatttgaccattcctgctacagatgcaaccaacaacattcattggtcttatttacatataaagtttgctgaacctatcagtctttttgtctgtgatgccgaattgtctgtaacagtcaactggagtaaaattataatagaatggagcaagcatgtaagaaagtgcaagtactgttcctcagttaataaatgtatgttaatagtaaaatatcatgctcaagatgatattgatttcaaattagacaatataactatattaaaaacttatgtatgcttaggcagtaagttaaagggatcggaggtttacttagtccttacaataggtcctgcgaatatattcccagtatttaatgtagtacaaaatgctaaattgatactatcaagaaccaaaaatttcatcatgcctaagaaagctgataaagagtctattgatgcaaatattaaaagtttgataccctttctttgttaccctataacaaaaaaaggaattaatactgcattgtcaaaactaaagagtgttgttagtggagatatactatcatattctatagctggacgtaatgaagttttcagcaataaacttataaatcataagcatatgaacatcttaaaatggttcaatcatgttttaaatttcagatcaacagaactaaactataaccatttatatatggtagaatctacatatccttacctaagtgaattgttaaacagcttgacaaccaatgaacttaaaaaactgattaaaatcacaggtagtctgttatacaactttcataatgaataatgaataaagatcttataataaaaattcccatagctatacactaacactgtattcaattatagttattaaaaattaaaaatcgtacgattttttaaataacttttagtgaactaatcctaaagttatcattttaatcttggaggaataaatttaaaccctaatctaattggtttatatgtgtattaactaaattacgagatattagtttttgacactttttttctcgt

SEQ ID NO: 90 - DNA, 23440 bp, Artificial Sequence
  Description of Artificial Sequence: Synthetic polynucleotide
aaacggatccttcgaaacgaaattaatacgactcactatagggaagtttttcgcgtctgatgaggccgttaggccgaaactcctctccggagtcacgcgaaaaaatgcgtacaacaaacttgcataaaccaaaaaaatggggcaaataagaatttgataagtaccacttaaatttaactcccttgcttagcgatggtgagcgagctgattaaggagaacatgcacatgaagctgtacatggagggcaccgtgaacaaccaccacttcaagtgcacatccgagggcgaaggcaagccctacgagggcacccagaccatgagaatcaaggcggtcgagggcggccctctccccttcgccttcgacatcctggctaccagcttcatgtacggcagcaaaaccttcatcaaccacacccagggcatccccgacttctttaagcagtccttccccgagggcttcacatgggagagagtcaccacatacgaagacgggggcgtgctgaccgctacccaggacaccagcctccaggacggctgcctcatctacaacgtcaagatcagaggggtgaacttcccatccaacggccctgtgatgcagaagaaaacactcggctgggaggcctccaccgagaccctgtaccccgctgacggcggcctggaaggcagagccgacatggccctgaagctcgtgggcgggggccacctgatctgcaacttgaagaccacatacagatccaagaaacccgctaagaacctcaagatgcccggcgtctactatgtggacagaagactggaaagaatcaaggaggccgacaaagagacctacgtcgagcagcacgaggtggctgtggccagatactgcgacctccctagcaaactggggcacagatgagtattcaattatagttattaaaaacttaacagaagacaaaaatggggcaaataagaatttgataagtaccacttaaatttaactcccttgcttagcgatgggttcgaattcgctatcgatgataaaagtacgtctacaaaatctatttgataatgatgaagtagcgctactaaaaataacgtgttatacggataaactaatacatctaacgaatgcgctagcgaaagcggtaatacatacgataaaactaaatggtatagtatttgtacatgtaataacgtcgtcggatatatgtccgaataataatatagtagtaaaatcgaattttacgacgatgccggtactacaaaatggtggttatatatgggaaatgatggaactaacgcattgttcgcaaccgaatggtctactagatgataattgtgaaataaaattttcgaaaaaactatcggattcgacgatgacgaattatatgaatcaactatcggaactactaggttttgatctaaatccgtaaattataattaatatcaactagcaaatcaatgtcactaacaccattagttaatataaaacttaacagaagacaaaaatggggcaaataaatcaattcagccaacccaaccatggatacgacgcataatgataatacgccgcaacgtctaatgataacggatatgcgtccgctatcgctagaaacgataataacgtcgctaacgcgtgatataataacgcataaatttatatatctaataaatcatgaatgtatagtacgtaaactagatgaacgtcaagcgacgtttacgtttctagtaaattatgaaatgaaactactacataaagtaggttcgacgaaatataaaaaatatacggaatataatacgaaatatggtacgtttccgatgccgatatttataaatcatgatggttttctagaatgtataggtataaaaccgacgaaacatacgccgataatatataaatatgatctaaatccgtaaatttcaacacaatattcacacaatctaaaacaacaactctatgcataactatactccatagtccagatggagcctgaaaattatagtaatttaaaattaaggagagatataagatagaagatggggcaaatacaaagatggctcttagcaaagtcaagttgaatgatacactcaacaaagatcaacttctgtcatccagcaaatacaccatccaacggagcacaggagatagtattgatactcctaattatgatgtgcagaaacacatcaataagttatgtggcatgttattaatcacagaagatgctaatcataaattcactgggttaataggtatgttatatgcgatgtctaggttaggaagagaagacaccataaaaatactcagagatgcgggatatcatgtaaaagcaaatggagtagatgtaacaacacatcgtcaagacattaatggaaaagaaatgaaatttgaagtgttaacattggcaagcttaacaactgaaattcaaatcaacattgagatagaatctagaaaatcctacaaaaaaatgctaaaagaaatgggagaggtagctccagaatacaggcatgactctcctgattgtgggatgataatattatgtatagcagcattagtaataactaaattagcagcaggggacagatctggtcttacagccgtgattaggagagctaataatgtcctaaaaaatgaaatgaaacgttacaaaggcttactacccaaggacatagccaacagcttctatgaagtgtttgaaaaacatccccactttatagatgtttttgttcattttggtatagcacaatcttctaccagaggtggcagtagagttgaagggatttttgcaggattgtttatgaatgcctatggtgcagggcaagtgatgttacggtggggagtcttagcaaaatcagttaaaaatattatgttaggacatgctagtgtgcaagcagaaatggaacaagttgttgaggtttatgaatatgcccaaaaattgggtggtgaagcaggattctaccatatattgaacaacccaaaagcatcattattatctttgactcaatttcctcacttctccagtgtagtattaggcaatgctgctggcctaggcataatgggagagtacagaggtacaccgaggaatcaagatctatatgatgcagcaaaggcatatgctgaacaactcaaagaaaatggtgtgattaactacagtgtactagacttgacagcagaagaactagaggctatcaaacatcagcttaatccaaaagataatgatgtagagctttgagttaataaaaaatggggcaaataaatcatcatggaaaagtttgctcctgaattccatggagaagatgcaaacaacagggctactaaattcctagaatcaataaagggcaaattcacatcacccaaagatcccaagaaaaaagatagtatcatatctgtcaactcaatagatatagaagtaaccaaagaaagccctataacatcaaattcaactattatcaacccaacaaatgagacagatgatactgcagggaacaagcccaattatcaaagaaaacctctagtaagtttcaaagaagaccctacaccaagtgataatcccttttctaaactatacaaagaaaccatagaaacatttgataacaatgaagaagaatccagctattcatacgaagaaataaatgatcagacaaacgataatataacagcaagattagataggattgatgaaaaattaagtgaaatactaggaatgcttcacacattagtagtggcaagtgcaggacctacatctgctcgggatggtataagagatgccatgattggtttaagagaagaaatgatagaaaaaatcagaactgaagcattaatgaccaatgacagattagaagctatggcaagactcaggaatgaggaaagtgaaaagatggcaaaagacacatcagatgaagtgtctctcaatccaacatcagagaaattgaacaacctattggaagggaatgatagtgacaatgatctatcacttgaagatttctgattagttaccactcttcacatcaacacacaataccaacagaagaccaacaaactaaccaacccaatcatccaaccaaacatccatccgccaatcagccaaacagccaacaaaacaaccagccaatccaaaactaaccacccggaaaaaatctataatatagttacaaaaaaaggaaagggtggggcaaatatggaaacatacgtgaacaagcttcacgaaggctccacatacacagctgctgttcaatacaatgtcttagaaaaagacgatgaccctgcatcacttacaatatgggtgcccatgttccaatcatctatgccagcagatttacttataaaagaactagctaatgtcaacatactagtgaaacaaatatccacacccaagggaccttcactaagagtcatgataaactcaagaagtgcagtgctagcacaaatgcccagcaaatttaccatatgcgctaatgtgtccttggatgaaagaagcaaactagcatatgatgtaaccacaccctgtgaaatcaaggcatgtagtctaacatgcctaaaatcaaaaaatatgttgactacagttaaagatctcactatgaagacactcaaccctacacatgatattattgctttatgtgaatttgaaaacatagtaacatcaaaaaaagtcataataccaacatacctaagatccatcagtgtcagaaataaagatctgaacacacttgaaaatataacaaccactgaattcaaaaatgctatcacaaatgcaaaaatcatcccttactcaggattactattagtcatcacagtgactgacaacaaaggagcattcaaatacataaagccacaaagtcaattcatagtagatcttggagcttacctagaaaaagaaagtatatattatgttaccacaaattggaagcacacagctacacgatttgcaatcaaacccatggaagattaacctttttcctctacatcagtgtgttaattcatacaaactttctacctacattcttcacttcaccatcacaatcacaaacactctgtggttcaaccaatcaaacaaaacttatctgaagtcccagatcatcccaagtcattgtttatcagatctagtactcaaataagttaataaaaaatatacacatggacgtccatggggcaaatgcaaacatgtttgtttttcttgttttattgccactagtctctagtcagtgtgttaatcttacaaccagaactcaattaccccctgcatacactaattctttcacacgtggtgtttattaccctgacaaagttttcagatcctcagttttacattcaactcaggacttgttcttacctttcttttccaatgttacttggttccatgctatacatgtctctgggaccaatggtactaagaggtttgataaccctgtcctaccatttaatgatggtgtttattttgcttccactgagaagtctaacataataagaggctggatttttggtactactttagattcgaagacccagtccctacttattgttaataacgctactaatgttgttattaaagtctgtgaatttcaattttgtaatgatccatttttgggtgtttattaccacaaaaacaacaaaagttggatggaaagtgagttcagagtttattctagtgcgaataattgcacttttgaatatgtctctcagccttttcttatggaccttgaaggaaaacagggtaatttcaaaaatcttagggaatttgtgtttaagaatattgatggttattttaaaatatattctaagcacacgcctattaatttagtgcgtgatctccctcagggtttttcggctttagaaccattggtagatttgccaataggtattaacatcactaggtttcaaactttacttgctttacatagaagttatttgactcctggtgattcttcttcaggttggacagctggtgctgcagcttattatgtgggttatcttcaacctaggacttttctattaaaatataatgaaaatggaaccattacagatgctgtagactgtgcacttgaccctctctcagaaacaaagtgtacgttgaaatccttcactgtagaaaaaggaatctatcaaacttctaactttagagtccaaccaacagaatctattgttagatttcctaatattacaaacttgtgcccttttggtgaagtttttaacgccaccagatttgcatctgtttatgcttggaacaggaagagaatcagcaactgtgttgctgattattctgtcctatataattccgcatcattttccacttttaagtgttatggagtgtctcctactaaattaaatgatctctgctttactaatgtctatgcagattcatttgtaattagaggtgatgaagtcagacaaatcgctccagggcaaactggaaagattgctgattataattataaattaccagatgattttacaggctgcgttatagcttggaattctaacaatcttgattctaaggttggtggtaattataattacctgtatagattgtttaggaagtctaatctcaaaccttttgagagagatatttcaactgaaatctatcaggccggtagcacaccttgtaatggtgttgaaggttttaattgttactttcctttacaatcatatggtttccaacccactaatggtgttggttaccaaccatacagagtagtagtactttcttttgaacttctacatgcaccagcaactgtttgtggacctaaaaagtctactaatttggttaaaaacaaatgtgtcaatttcaacttcaatggtttaacaggcacaggtgttcttactgagtctaacaaaaagtttctgcctttccaacaatttggcagagacattgctgacactactgatgctgtccgtgatccacagacacttgagattcttgacattacaccatgttcttttggtggtgtcagtgttataacaccaggaacaaatacttctaaccaggttgctgttctttatcaggatgttaactgcacagaagtccctgttgctattcatgcagatcaacttactcctacttggcgtgtttattctacaggttctaatgtttttcaaacacgtgcaggctgtttaataggggctgaacatgtcaacaactcatatgagtgtgacatacccattggtgcaggtatatgcgctagttatcagactcagactaattctcgtagtgtagctagtcaatccatcattgcctacactatgtcacttggtgcagaaaattcagttgcttactctaataactctattgccatacccacaaattttactattagtgttaccacagaaattctaccagtgtctatgaccaagacatcagtagattgtacaatgtacatttgtggtgattcaactgaatgcagcaatcttttgttgcaatatggcagtttttgtacacaattaaaccgtgctttaactggaatagctgttgaacaagacaaaaacacccaagaagtttttgcacaagtcaaacaaatttacaaaacaccaccaattaaagattttggtggttttaatttttcacaaatattaccagatccatcaaaaccaagcaagaggtcatttattgaagatctacttttcaacaaagtgacacttgcagatgctggcttcatcaaacaatatggtgattgccttggtgatattgctgctagagacctcatttgtgcacaaaagtttaacggccttactgttttgccacctttgctcacagatgaaatgattgctcaatacacttctgcactgttagcgggtacaatcacttctggttggacctttggtgcaggtgctgcattacaaataccatttgctatgcaaatggcttataggtttaatggtattggagttacacagaatgttctctatgagaaccaaaaattgattgccaaccaatttaatagtgctattggcaaaattcaagactcactttcttccacagcaagtgcacttggaaaacttcaagatgtggtcaaccaaaatgcacaagctttaaacacgcttgttaaacaacttagctccaattttggtgcaatttcaagtgttttaaatgatatcctttcacgtcttgacaaagttgaggctgaagtgcaaattgataggttgatcacaggcagacttcaaagtttgcagacatatgtgactcaacaattaattagagctgcagaaatcagagcttctgctaatcttgctgctactaaaatgtcagagtgtgtacttggacaatcaaaaagagttgatttttgtggaaagggctatcatcttatgtccttccctcagtcagcacctcatggtgtagtcttcttgcatgtgacttatgtccctgcacaagaaaagaacttcacaactgctcctgccatttgtcatgatggaaaagcacactttcctcgtgaaggtgtctttgtttcaaatggcacacactggtttgtaacacaaaggaatttttatgaaccacaaatcattactacagacaacacatttgtgtctggtaactgtgatgttgtaataggaattgtcaacaacacagtttatgatcctttgcaacctgaattagactcattcaaggaggagttagataaatattttaagaatcatacatcaccagatgttgatttaggtgacatctctggcattaatgcttcagttgtaaacattcaaaaagaaattgaccgcctcaatgaggttgccaagaatttaaatgaatctctcatcgatctccaagaacttggaaagtatgagcagtatataaaatggccatggtacatttggctaggttttatagctggcttgattgccatagtaatggtgacaattatgctttgctgtatgaccagttgctgtagttgtctcaagggctgttgttcttgtggatcctgctgcaaatttgatgaagacgacggactgctcctatactgtaaggccagaagcacaccaatcacactaagcaaggatcaactgagtggtataaataatattgcatttagtaactaaataaaaatagcacctaatcatgttcttacaatggtttactatctgctcatagacaacccatctatcattggattttcttaaaatctgaacttcatcgaaactcttatctataaaccatctcacttacactatttaagtagattcctagtttatagttatataaaacacaattgaatgccagtcgaccttaccatctgtaaaaatgaaaactggggcaaatatgtcacgaaggaatccttgcaaatttgaaattcgaggtcattgcttaaatggtaagaggtgtcattttagtcataattattttgaatggccaccccatgcactgcttgtaagacaaaactttatgttaaacagaatacttaagtctatggataaaagtatagataccttatcagaaataagtggagctgcagagttggacagaacagaagagtatgctcttggtgtagttggagtgctagagagttatataggatcaataaacaatataactaaacaatcagcatgtgttgccatgagcaaactcctcactgaactcaatagtgatgatatcaaaaagctgagggacaatgaagagctaaattcacccaagataagagtgtacaatactgtcatatcatatattgaaagcaacaggaaaaacaataaacaaactatccatctgttaaaaagattgccagcagacgtattgaagaaaaccatcaaaaacacattggatatccataagagcataaccatcaacaacccaaaagaatcaactgttagtgatacaaatgaccatgccaaaaataatgatactacctgacaaatatccttgtagtataacttccatactaataacaagtagatgtagagttactatgtataatcaaaagaacacactatatttcaatcaaaacaacccaaataaccatatgtactcaccgaatcaaacattcaatgaaatccattggacctctcaagaattgattgacacaattcaaaattttctacaacatctaggtattattgaggatatatatacaatatatatattagtgtcataacactcaattctaacactcaccacatcgttacattattaattcaaacaattcaagttgtgggacaaaatggatcccattattaatggaaattctgctaatgtttatctaaccgatagttatttaaaaggtgttatctctttctcagagtgtaatgctttaggaagttacatattcaatggtccttatctcaaaaatgattataccaacttaattagtagacaaaatccattaatagaacacatgaatctaaagaaactaaatataacacagtccttaatatctaagtatcataaaggtgaaataaaattagaagaacctacttattttcagtcattacttatgacatacaagagtatgacctcgtcagaacagattgctaccactaatttacttaaaaagataataagaagagctatagaaataagtgatgtcaaagtctatgctatattgaataaactagggcttaaagaaaaggacaagattaaatccaacaatggacaagatgaagacaactcagttattacgaccataatcaaagatgatatactttcagctgttaaagataatcaatctcatcttaaagcagacaaaaatcactctacaaaacaaaaagacacaatcaaaacaacactcttgaagaaattgatgtgttcaatgcaacatcctccatcatggttaatacattggtttaacttatacacaaaattaaacaacatattaacacagtatcgatcaaatgaggtaaaaaaccatgggtttacattgatagataatcaaactcttagtggatttcaatttattttgaaccaatatggttgtatagtttatcataaggaactcaaaagaattactgtgacaacctataatcaattcttgacatggaaagatattagccttagtagattaaatgtttgtttaattacatggattagtaactgcttgaacacattaaataaaagcttaggcttaagatgcggattcaataatgttatcttgacacaactattcctttatggagattgtatactaaagctatttcacaatgaggggttctacataataaaagaggtagagggatttattatgtctctaattttaaatataacagaagaagatcaattcagaaaacgattttataatagtatgctcaacaacatcacagatgctgctaataaagctcagaaaaatctgctatcaagagtatgtcatacattattagataagacagtgtccgataatataataaatggcagatggataattctattaagtaagttccttaaattaattaagcttgcaggtgacaataaccttaacaatctgagtgaactatattttttgttcagaatatttggacacccaatggtagatgaaagacaagccatggatgctgttaaaattaattgcaatgagaccaaattttacttgttaagcagtctgagtatgttaagaggtgcctttatatatagaattataaaagggtttgtaaataattacaacagatggcctactttaagaaatgctattgttttacccttaagatggttaacttactataaactaaacacttatccttctttgttggaacttacagaaagagatttgattgtgttatcaggactacgtttctatcgtgagtttcggttgcctaaaaaagtggatcttgaaatgattataaatgataaagctatatcacctcctaaaaatttgatatggactagtttccctagaaattacatgccatcacacatacaaaactatatagaacatgaaaaattaaaattttccgagagtgataaatcaagaagagtattagagtattatttaagagataacaaattcaatgaatgtgatttatacaactgtgtagttaatcaaagttatctcaacaaccctaatcatgtggtatcattgacaggcaaagaaagagaactcagtgtaggtagaatgtttgcaatgcaaccgggaatgttcagacaggttcaaatattggcagagaaaatgatagctgaaaacattttacaattctttcctgaaagtcttacaagatatggtgatctagaactacaaaaaatattagaattgaaagcaggaataagtaacaaatcaaatcgctacaatgataattacaacaattacattagtaagtgctctatcatcacagatctcagcaaattcaatcaagcatttcgatatgaaacgtcatgtatttgtagtgatgtgctggatgaactgcatggtgtacaatctctattttcctggttacatttaactattcctcatgtcacaataatatgcacatataggcatgcacccccctatataggagatcatattgtagatcttaacaatgtagatgaacaaagtggattatatagatatcacatgggtggcatcgaagggtggtgtcaaaaactgtggaccatagaagctatatcactattggatctaatatctctcaaagggaaattctcaattactgctttaattaatggtgacaatcaatcaatagatataagcaaaccaatcagactcatggaaggtcaaactcatgctcaagcagattatttgctagcattaaatagccttaaattactgtataaagagtatgcaggcataggccacaaattaaaaggaactgagacttatatatcacgagatatgcaatttatgagtaaaacaattcaacataacggtgtatattacccagctagtataaagaaagtcctaagagtgggaccgtggataaacactatacttgatgatttcaaagtgagtctagaatctataggtagtttgacacaagaattagaatatagaggtgaaagtctattatgcagtttaatatttagaaatgtatggttatataatcagattgctctacaattaaaaaatcatgcattatgtaacaataaactatatttggacatattaaaggttctgaaacacttaaaaaccttttttaatcttgataatattgatacagcattaacattgtatatgaatttacccatgttatttggtggtggtgatcccaacttgttatatcgaagtttctatagaagaactcctgacttcctcacagaggctatagttcactctgtgttcatacttagttattatacaaaccatgacttaaaagataaacttcaagatctgtcagatgatagattgaataagttcttaacatgcataatcacgtttgacaaaaaccctaatgctgaattcgtaacattgatgagagatcctcaagctttagggtctgagagacaagctaaaattactagcgaaatcaatagactggcagttacagaggttttgagtacagctccaaacaaaatattctccaaaagtgcacaacattatactactacagagatagatctaaatgatattatgcaaaatatagaacctacatatcctcatgggctaagagttgtttatgaaagtttacccttttataaagcagagaaaatagtaaatcttatatcaggtacaaaatctataactaacatactggaaaaaacttctgccatagacttaacagatattgatagagccactgagatgatgaggaaaaacataactttgcttataaggatacttccattggattgtaacagagataaaagagagatattgagtatggaaaacctaagtattactgaattaagcaaatatgttagggaaagatcttggtctttatccaatatagttggtgttacatcacccagtatcatgtatacaatggacatcaaatatactacaagcactatatctagtggcataattatagagaaatataatgttaacagtttaacacgtggtgagagaggacccactaaaccatgggttggttcatctacacaagagaaaaaaacaatgccagtttataatagacaagtcttaaccaaaaaacagagagatcaaatagatctattagcaaaattggattgggtgtatgcatctatagataacaaggatgaattcatggaagaactcagcataggaacccttgggttaacatatgaaaaggccaagaaattatttccacaatatttaagtgtcaattatttgcatcgccttacagtcagtagtagaccatgtgaattccctgcatcaataccagcttatagaacaacaaattatcactttgacactagccctattaatcgcatattaacagaaaagtatggtgatgaagatattgacatagtattccaaaactgtataagctttggccttagtttaatgtcagtagtagaacaatttactaatgtatgtcctaacagaattattctcatacctaagcttaatgagatacatttgatgaaacctcccatattcacaggtgatgttgatattcacaagttaaaacaagtgatacaaaaacagcatatgtttttaccagacaaaataagtttgactcaatatgtggaattattcttaagtaataaaacactcaaatctggatctcatgttaattctaatttaatattggcacataaaatatctgactattttcataatacttacattttaagtactaatttagctggacattggattctgattatacaacttatgaaagattctaaaggtatttttgaaaaagattggggagagggatatataactgatcatatgtttattaatttgaaagttttcttcaatgcttataagacctatctcttgtgttttcataaaggttatggcaaagcaaagctggagtgtgatatgaacacttcagatcttctatgtgtattggaattaatagacagtagttattggaagtctatgtctaaggtatttttagaacaaaaagttatcaaatacattcttagccaagatgcaagtttacatagagtaaaaggatgtcatagcttcaaattatggtttcttaaacgtcttaatgtagcagaattcacagtttgcccttgggttgttaacatagattatcatccaacacatatgaaagcaatattaacttatatagatcttgttagaatgggattgataaatatagatagaatacacattaaaaataaacacaaattcaatgatgaattttatacttctaatctcttctacattaattataacttctcagataatactcatctattaactaaacatataaggattgctaattctgaattagaaaataattacaacaaattatatcatcctacaccagaaaccctagagaatatactagccaatccgattaaaagtaatgacaaaaagacactgaatgactattgtataggtaaaaatgttgactcaataatgttaccattgttatctaataagaagcttattaaatcgtctgcaatgattagaaccaattacagcaaacaagatttgtataatttattccctatggttgtgattgatagaattatagatcattcaggcaatacagccaaatccaaccaactttacactactacttcccaccaaatatctttagtgcacaatagcacatcactttactgcatgcttccttggcatcatattaatagattcaattttgtatttagttctacaggttgtaaaattagtatagagtatattttaaaagatcttaaaattaaagatcccaattgtatagcattcataggtgaaggagcagggaatttattattgcgtacagtagtggaacttcatcctgacataagatatatttacagaagtctgaaagattgcaatgatcatagtttacctattgagtttttaaggctgtacaatggacatatcaacattgattatggtgaaaatttgaccattcctgctacagatgcaaccaacaacattcattggtcttatttacatataaagtttgctgaacctatcagtctttttgtctgtgatgccgaattgtctgtaacagtcaactggagtaaaattataatagaatggagcaagcatgtaagaaagtgcaagtactgttcctcagttaataaatgtatgttaatagtaaaatatcatgctcaagatgatattgatttcaaattagacaatataactatattaaaaacttatgtatgcttaggcagtaagttaaagggatcggaggtttacttagtccttacaataggtcctgcgaatatattcccagtatttaatgtagtacaaaatgctaaattgatactatcaagaaccaaaaatttcatcatgcctaagaaagctgataaagagtctattgatgcaaatattaaaagtttgataccctttctttgttaccctataacaaaaaaaggaattaatactgcattgtcaaaactaaagagtgttgttagtggagatatactatcatattctatagctggacgtaatgaagttttcagcaataaacttataaatcataagcatatgaacatcttaaaatggttcaatcatgttttaaatttcagatcaacagaactaaactataaccatttatatatggtagaatctacatatccttacctaagtgaattgttaaacagcttgacaaccaatgaacttaaaaaactgattaaaatcacaggtagtctgttatacaactttcataatgaataatgaataaagatcttataataaaaattcccatagctatacactaacactgtattcaattatagttattaaaaattaaaaatcgtacgattttttaaataacttttagtgaactaatcctaaagttatcattttaatcttggaggaataaatttaaaccctaatctaattggtttatatgtgtattaactaaattacgagatattagtttttgacactttttttctcgtgggtcggcatggcatctccacctcctcgcggtccgacctgggcatccgaaggaggacgcacgtccactcggatggctaagggagctgctaacaaagcccgaaaggaagctgagttggctgctgccaccgctgagcaataactagcataaccccttggggcctctaaacgggtcttgaggggttttttgctgaaaggaggaactatatacgcgtaagcttctcgacccattctcatgtttgacagcttatcatcgaatttctgccattcatccgcttattatcacttattcaggcgtagcaaccaggcgtttaagggcaccaataactgccttaaaaaaattacgccccgccctgccactcatcgcagtactgttgtaattcattaagcattctgccgacatggaagccatcacagacggcatgatgaacctgaatcgccagcggcatcagcaccttgtcgccttgcgtataatatttgcccatggtgaaaacgggggcgaagaagttgtccatattggccacgtttaaatcaaaactggtgaaactcacccagggattggctgagacgaaaaacatattctcaataaaccctttagggaaataggccaggttttcaccgtaacacgccacatcttgcgaatatatgtgtagaaactgccggaaatcgtcgtggtattcactccagagcgatgaaaacgtttcagtttgctcatggaaaacggtgtaacaagggtgaacactatcccatatcaccagctcaccgtctttcattgccatacggaattccggatgagcattcatcaggcgggcaagaatgtgaataaaggccggataaaacttgtgcttatttttctttacggtctttaaaaaggccgtaatatccagctgaacggtctggttataggtacattgagcaactgactgaaatgcctcaaaatgttctttacgatgccattgggatatatcaacggtggtatatccagtgatttttttctccattttagcttccttagctcctgaaaatctcgataactcaaaaaatacgcccggtagtgatcttatttcattatggtgaaagttggaacctcttacgtgccgatcaacgtctcattttcgccaaaagttggcccagggcttcccggtatcaacagggacaccaggatttatttattctgcgaagtgatcttccgtcacaggtatttattcgcgataagctcatggagcggcgtaaccgtcgcacaggaaggacagagaaagcgcggatctgggaagtgacggacagaacggtcaggacctggattggggaggcggttgccgccgctgctgctgacggtgtgacgttctctgttccggtcacaccacatacgttccgccattcctatgcgatgcacatgctgtatgccggtataccgctgaaagttctgcaaagcctgatgggacataagtccatcagttcaacggaagtctacacgaaggtttttgcgctggatgtggctgcccggcaccgggtgcagtttgcgatgccggagtctgatgcggttgcgatgctgaaacaattatcctgagaataaatgccttggcctttatatggaaatgtggaactgagtggatatgctgtttttgtctgttaaacagagaagctggctgttatccactgagaagcgaacgaaacagtcgggaaaatctcccattatcgtagagatccgcattattaatctcaggagcctgtgtagcgtttataggaagtagtgttctgtcatgatgcctgcaagcggtaacgaaaacgatttgaatatgccttcaggaacaatagaaatcttcgtgcggtgttacgttgaagtggagcggattatgtcagcaatggacagaacaacctaatgaacacagaaccatgatgtggtctgtccttttacagccagtaggctcgccgcagtcgagcgacggcgaagccctcgagtgagcgaggaagcaccagggaacagcacttatatattctgcttacacacgatgcctgaaaaaacttcccttggggttatccacttatccacggggatatttttataattattttttttatagtttttagatcttcttttttagagcgccttgtaggcctttatccatgctggttctagagaaggtgttgtgacaaattgccctttcagtgtgacaaatcaccctcaaatgacagtcctgtctgtgacaaattgcccttaaccctgtgacaaattgccctcagaagaagctgttttttcacaaagttatccctgcttattgactcttttttatttagtgtgacaatctaaaaacttgtcacacttcacatggatctgtcatggcggaaacagcggttatcaatcacaagaaacgtaaaaatagcccgcgaatcgtccagtcaaacgacctcactgaggcggcatatagtctctcccgggatcaaaaacgtatgctgtatctgttcgttgaccagatcagaaaatctgatggcaccctacaggaacatgacggtatctgcgagatccatgttgctaaatatgctgaaatattcggattgacctctgcggaagccagtaaggatatacggcaggcattgaagagtttcgcggggaaggaagtggttttttatcgccctgaagaggatgccggcgatgaaaaaggctatgaatcttttccttggtttatcaaacgtgcgcacagtccatccagagggctttacagtgtacatatcaacccatatctcattcccttctttatcgggttacagaaccggtttacgcagtttcggcttagtgaaacaaaagaaatcaccaatccgtatgccatgcgtttatacgaatccctgtgtcagtatcgtaagccggatggctcaggcatcgtctctctgaaaatcgactggatcatagagcgttaccagctgcctcaaagttaccagcgtatgcctgacttccgccgccgcttcctgcaggtctgtgttaatgagatcaacagcagaactccaatgcgcctctcatacattgagaaaaagaaaggccgccagacgactcatatcgtattttccttccgcgatatcacttccatgacgacaggatagtctgagggttatctgtcacagatttgagggtggttcgtcacatttgttctgacctactgagggtaatttgtcacagttttgctgtttccttcagcctgcatggattttctcatactttttgaactgtaatttttaaggaagccaaatttgagggcagtttgtcacagttgatttccttctctttcccttcgtcatgtgacctgatatcgggggttagttcgtcatcattgatgagggttgattatcacagtttattactctgaattggctatccgcgtgtgtacctctacctggagtttttcccacggtggatatttcttcttgcgctgagcgtaagagctatctgacagaacagttcttctttgcttcctcgccagttcgctcgctatgctcggttacacggctgcggcgagcgctagtgataataagtgactgaggtatgtgctcttcttatctccttttgtagtgttgctcttattttaaacaactttgcggttttttgatgactttgcgattttgttgttgctttgcagtaaattgcaagatttaataaaaaaacgcaaagcaatgattaaaggatgttcagaatgaaactcatggaaacacttaaccagtgcataaacgctggtcatgaaatgacgaaggctatcgccattgcacagtttaatgatgacagcccggaagcgaggaaaataacccggcgctggagaataggtgaagcagcggatttagttggggtttcttctcaggctatcagagatgccgagaaagcagggcgactaccgcacccggatatggaaattcgaggacgggttgagcaacgtgttggttatacaattgaacaaattaatcatatgcgtgatgtgtttggtacgcgattgcgacgtgctgaagacgtatttccaccggtgatcggggttgctgcccataaaggtggcgtttacaaaacctcagtttctgttcatcttgctcaggatctggctctgaaggggctacgtgttttgctcgtggaaggtaacgacccccagggaacagcctcaatgtatcacggatgggtaccagatcttcatattcatgcagaagacactctcctgcctttctatcttggggaaaaggacgatgtcacttatgcaataaagcccacttgctggccggggcttgacattattccttcctgtctggctctgcaccgtattgaaactgagttaatgggcaaatttgatgaaggtaaactgcccaccgatccacacctgatgctccgactggccattgaaactgttgctcatgactatgatgtcatagttattgacagcgcgcctaacctgggtatcggcacgattaatgtcgtatgtgctgctgatgtgctgattgttcccacgcctgctgagttgtttgactacacctccgcactgcagtttttcgatatgcttcgtgatctgctcaagaacgttgatcttaaagggttcgagcctgatgtacgtattttgcttaccaaatacagcaatagtaatggctctcagtccccgtggatggaggagcaaattcgggatgcctggggaagcatggttctaaaaaatgttgtacgtgaaacggatgaagttggtaaaggtcagatccggatgagaactgtttttgaacaggccattgatcaacgctcttcaactggtgcctggagaaatgctctttctatttgggaacctgtctgcaatgaaattttcgatcgtctgattaaaccacgctgggagattagataatgaagcgtgcgcctgttattccaaaacatacgctcaatactcaaccggttgaagatacttcgttatcgacaccagctgccccgatggtggattcgttaattgcgcgcgtaggagtaatggctcgcggtaatgccattactttgcctgtatgtggtcgggatgtgaagtttactcttgaagtgctccggggtgatagtgttgagaagacctctcgggtatggtcaggtaatgaacgtgaccaggagctgcttactgaggacgcactggatgatctcatcccttcttttctactgactggtcaacagacaccggcgttcggtcgaagagtatctggtgtcatagaaattgccgatgggagtcgccgtcgtaaagctgctgcacttaccgaaagtgattatcgtgttctggttggcgagctggatgatgagcagatggctgcattatccagattgggtaacgattatcgcccaacaagtgcttatgaacgtggtcagcgttatgcaagccgattgcagaatgaatttgctggaaatatttctgcgctggctgatgcggaaaatatttcacgtaagattattacccgctgtatcaacaccgccaaattgcctaaatcagttgttgctcttttttctcaccccggtgaactatctgcccggtcaggtgatgcacttcaaaaagcctttacagataaagaggaattacttaagcagcaggcatctaaccttcatgagcagaaaaaagctggggtgatatttgaagctgaagaagttatcactcttttaacttctgtgcttaaaacgtcatctgcatcaagaactagtttaagctcacgacatcagtttgctcctggagcgacagtattgtataagggcgataaaatggtgcttaacctggacaggtctcgtgttccaactgagtgtatagagaaaattgaggccattcttaaggaacttgaaaagccagcaccctgatgcgaccacgttttagtctacgtttatctgtctttacttaatgtcctttgttacaggccagaaagcataactggcctgaatattctctctgggcccactgttccacttgtatcgtcggtctgataatcagactgggaccacggtcccactcgtatcgtcggtctgattattagtctgggaccacggtcccactcgtatcgtcggtctgattattagtctgggaccacggtcccactcgtatcgtcggtctgataatcagactgggaccacggtcccactcgtatcgtcggtctgattattagtctgggaccatggtcccactcgtatcgtcggtctgattattagtctgggaccacggtcccactcgtatcgtcggtctgattattagtctggaaccacggtcccactcgtatcgtcggtctgattattagtctgggaccacggtcccactcgtatcgtcggtctgattattagtctgggaccacgatcccactcgtgttgtcggtctgattatcggtctgggaccacggtcccacttgtattgtcgatcagactatcagcgtgagactacgattccatcaatgcctgtcaagggcaagtattgacatgtcgtcgtaacctgtagaacggagtaacctcggtgtgcggttgtatgcctgctgtggattgctgctgtgtcctgcttatccacaacattttgcgcacggttatgtggacaaaatacctggttacccaggccgtgccggcacgttaaccgggctgcatccgatgcaagtgtgtcgctgtcgagttt

SEQ ID NO: 91 - DNA, 22644 bp, Artificial Sequence
  Description of Artificial Sequence: Synthetic polynucleotide
aaacggatccttcgaaacgaaattaatacgactcactatagggaagtttttcgcgtctgatgaggccgttaggccgaaactcctctccggagtcacgcgaaaaaatgcgtacaacaaacttgcataaaccaaaaaaatggggcaaataagaatttgataagtaccacttaaatttaactcccttgcttagcgatgggttcgaattcgctatcgatgataaaagtacgtctacaaaatctatttgataatgatgaagtagcgctactaaaaataacgtgttatacggataaactaatacatctaacgaatgcgctagcgaaagcggtaatacatacgataaaactaaatggtatagtatttgtacatgtaataacgtcgtcggatatatgtccgaataataatatagtagtaaaatcgaattttacgacgatgccggtactacaaaatggtggttatatatgggaaatgatggaactaacgcattgttcgcaaccgaatggtctactagatgataattgtgaaataaaattttcgaaaaaactatcggattcgacgatgacgaattatatgaatcaactatcggaactactaggttttgatctaaatccgtaaattataattaatatcaactagcaaatcaatgtcactaacaccattagttaatataaaacttaacagaagacaaaaatggggcaaataaatcaattcagccaacccaaccatggatacgacgcataatgataatacgccgcaacgtctaatgataacggatatgcgtccgctatcgctagaaacgataataacgtcgctaacgcgtgatataataacgcataaatttatatatctaataaatcatgaatgtatagtacgtaaactagatgaacgtcaagcgacgtttacgtttctagtaaattatgaaatgaaactactacataaagtaggttcgacgaaatataaaaaatatacggaatataatacgaaatatggtacgtttccgatgccgatatttataaatcatgatggttttctagaatgtataggtataaaaccgacgaaacatacgccgataatatataaatatgatctaaatccgtaaatttcaacacaatattcacacaatctaaaacaacaactctatgcataactatactccatagtccagatggagcctgaaaattatagtaatttaaaattaaggagagatataagatagaagatggggcaaatacaaagatggctcttagcaaagtcaagttgaatgatacactcaacaaagatcaacttctgtcatccagcaaatacaccatccaacggagcacaggagatagtattgatactcctaattatgatgtgcagaaacacatcaataagttatgtggcatgttattaatcacagaagatgctaatcataaattcactgggttaataggtatgttatatgcgatgtctaggttaggaagagaagacaccataaaaatactcagagatgcgggatatcatgtaaaagcaaatggagtagatgtaacaacacatcgtcaagacattaatggaaaagaaatgaaatttgaagtgttaacattggcaagcttaacaactgaaattcaaatcaacattgagatagaatctagaaaatcctacaaaaaaatgctaaaagaaatgggagaggtagctccagaatacaggcatgactctcctgattgtgggatgataatattatgtatagcagcattagtaataactaaattagcagcaggggacagatctggtcttacagccgtgattaggagagctaataatgtcctaaaaaatgaaatgaaacgttacaaaggcttactacccaaggacatagccaacagcttctatgaagtgtttgaaaaacatccccactttatagatgtttttgttcattttggtatagcacaatcttctaccagaggtggcagtagagttgaagggatttttgcaggattgtttatgaatgcctatggtgcagggcaagtgatgttacggtggggagtcttagcaaaatcagttaaaaatattatgttaggacatgctagtgtgcaagcagaaatggaacaagttgttgaggtttatgaatatgcccaaaaattgggtggtgaagcaggattctaccatatattgaacaacccaaaagcatcattattatctttgactcaatttcctcacttctccagtgtagtattaggcaatgctgctggcctaggcataatgggagagtacagaggtacaccgaggaatcaagatctatatgatgcagcaaaggcatatgctgaacaactcaaagaaaatggtgtgattaactacagtgtactagacttgacagcagaagaactagaggctatcaaacatcagcttaatccaaaagataatgatgtagagctttgagttaataaaaaatggggcaaataaatcatcatggaaaagtttgctcctgaattccatggagaagatgcaaacaacagggctactaaattcctagaatcaataaagggcaaattcacatcacccaaagatcccaagaaaaaagatagtatcatatctgtcaactcaatagatatagaagtaaccaaagaaagccctataacatcaaattcaactattatcaacccaacaaatgagacagatgatactgcagggaacaagcccaattatcaaagaaaacctctagtaagtttcaaagaagaccctacaccaagtgataatcccttttctaaactatacaaagaaaccatagaaacatttgataacaatgaagaagaatccagctattcatacgaagaaataaatgatcagacaaacgataatataacagcaagattagataggattgatgaaaaattaagtgaaatactaggaatgcttcacacattagtagtggcaagtgcaggacctacatctgctcgggatggtataagagatgccatgattggtttaagagaagaaatgatagaaaaaatcagaactgaagcattaatgaccaatgacagattagaagctatggcaagactcaggaatgaggaaagtgaaaagatggcaaaagacacatcagatgaagtgtctctcaatccaacatcagagaaattgaacaacctattggaagggaatgatagtgacaatgatctatcacttgaagatttctgattagttaccactcttcacatcaacacacaataccaacagaagaccaacaaactaaccaacccaatcatccaaccaaacatccatccgccaatcagccaaacagccaacaaaacaaccagccaatccaaaactaaccacccggaaaaaatctataatatagttacaaaaaaaggaaagggtggggcaaatatggaaacatacgtgaacaagcttcacgaaggctccacatacacagctgctgttcaatacaatgtcttagaaaaagacgatgaccctgcatcacttacaatatgggtgcccatgttccaatcatctatgccagcagatttacttataaaagaactagctaatgtcaacatactagtgaaacaaatatccacacccaagggaccttcactaagagtcatgataaactcaagaagtgcagtgctagcacaaatgcccagcaaatttaccatatgcgctaatgtgtccttggatgaaagaagcaaactagcatatgatgtaaccacaccctgtgaaatcaaggcatgtagtctaacatgcctaaaatcaaaaaatatgttgactacagttaaagatctcactatgaagacactcaaccctacacatgatattattgctttatgtgaatttgaaaacatagtaacatcaaaaaaagtcataataccaacatacctaagatccatcagtgtcagaaataaagatctgaacacacttgaaaatataacaaccactgaattcaaaaatgctatcacaaatgcaaaaatcatcccttactcaggattactattagtcatcacagtgactgacaacaaaggagcattcaaatacataaagccacaaagtcaattcatagtagatcttggagcttacctagaaaaagaaagtatatattatgttaccacaaattggaagcacacagctacacgatttgcaatcaaacccatggaagattaacctttttcctctacatcagtgtgttaattcatacaaactttctacctacattcttcacttcaccatcacaatcacaaacactctgtggttcaaccaatcaaacaaaacttatctgaagtcccagatcatcccaagtcattgtttatcagatctagtactcaaataagttaataaaaaatatacacatggacgtccatggggcaaatgcaaacatgtttgtttttcttgttttattgccactagtctctagtcagtgtgttaatcttacaaccagaactcaattaccccctgcatacactaattctttcacacgtggtgtttattaccctgacaaagttttcagatcctcagttttacattcaactcaggacttgttcttacctttcttttccaatgttacttggttccatgctatacatgtctctgggaccaatggtactaagaggtttgataaccctgtcctaccatttaatgatggtgtttattttgcttccactgagaagtctaacataataagaggctggatttttggtactactttagattcgaagacccagtccctacttattgttaataacgctactaatgttgttattaaagtctgtgaatttcaattttgtaatgatccatttttgggtgtttattaccacaaaaacaacaaaagttggatggaaagtgagttcagagtttattctagtgcgaataattgcacttttgaatatgtctctcagccttttcttatggaccttgaaggaaaacagggtaatttcaaaaatcttagggaatttgtgtttaagaatattgatggttattttaaaatatattctaagcacacgcctattaatttagtgcgtgatctccctcagggtttttcggctttagaaccattggtagatttgccaataggtattaacatcactaggtttcaaactttacttgctttacatagaagttatttgactcctggtgattcttcttcaggttggacagctggtgctgcagcttattatgtgggttatcttcaacctaggacttttctattaaaatataatgaaaatggaaccattacagatgctgtagactgtgcacttgaccctctctcagaaacaaagtgtacgttgaaatccttcactgtagaaaaaggaatctatcaaacttctaactttagagtccaaccaacagaatctattgttagatttcctaatattacaaacttgtgcccttttggtgaagtttttaacgccaccagatttgcatctgtttatgcttggaacaggaagagaatcagcaactgtgttgctgattattctgtcctatataattccgcatcattttccacttttaagtgttatggagtgtctcctactaaattaaatgatctctgctttactaatgtctatgcagattcatttgtaattagaggtgatgaagtcagacaaatcgctccagggcaaactggaaagattgctgattataattataaattaccagatgattttacaggctgcgttatagcttggaattctaacaatcttgattctaaggttggtggtaattataattacctgtatagattgtttaggaagtctaatctcaaaccttttgagagagatatttcaactgaaatctatcaggccggtagcacaccttgtaatggtgttgaaggttttaattgttactttcctttacaatcatatggtttccaacccactaatggtgttggttaccaaccatacagagtagtagtactttcttttgaacttctacatgcaccagcaactgtttgtggacctaaaaagtctactaatttggttaaaaacaaatgtgtcaatttcaacttcaatggtttaacaggcacaggtgttcttactgagtctaacaaaaagtttctgcctttccaacaatttggcagagacattgctgacactactgatgctgtccgtgatccacagacacttgagattcttgacattacaccatgttcttttggtggtgtcagtgttataacaccaggaacaaatacttctaaccaggttgctgttctttatcaggatgttaactgcacagaagtccctgttgctattcatgcagatcaacttactcctacttggcgtgtttattctacaggttctaatgtttttcaaacacgtgcaggctgtttaataggggctgaacatgtcaacaactcatatgagtgtgacatacccattggtgcaggtatatgcgctagttatcagactcagactaattctcgtagtgtagctagtcaatccatcattgcctacactatgtcacttggtgcagaaaattcagttgcttactctaataactctattgccatacccacaaattttactattagtgttaccacagaaattctaccagtgtctatgaccaagacatcagtagattgtacaatgtacatttgtggtgattcaactgaatgcagcaatcttttgttgcaatatggcagtttttgtacacaattaaaccgtgctttaactggaatagctgttgaacaagacaaaaacacccaagaagtttttgcacaagtcaaacaaatttacaaaacaccaccaattaaagattttggtggttttaatttttcacaaatattaccagatccatcaaaaccaagcaagaggtcatttattgaagatctacttttcaacaaagtgacacttgcagatgctggcttcatcaaacaatatggtgattgccttggtgatattgctgctagagacctcatttgtgcacaaaagtttaacggccttactgttttgccacctttgctcacagatgaaatgattgctcaatacacttctgcactgttagcgggtacaatcacttctggttggacctttggtgcaggtgctgcattacaaataccatttgctatgcaaatggcttataggtttaatggtattggagttacacagaatgttctctatgagaaccaaaaattgattgccaaccaatttaatagtgctattggcaaaattcaagactcactttcttccacagcaagtgcacttggaaaacttcaagatgtggtcaaccaaaatgcacaagctttaaacacgcttgttaaacaacttagctccaattttggtgcaatttcaagtgttttaaatgatatcctttcacgtcttgacaaagttgaggctgaagtgcaaattgataggttgatcacaggcagacttcaaagtttgcagacatatgtgactcaacaattaattagagctgcagaaatcagagcttctgctaatcttgctgctactaaaatgtcagagtgtgtacttggacaatcaaaaagagttgatttttgtggaaagggctatcatcttatgtccttccctcagtcagcacctcatggtgtagtcttcttgcatgtgacttatgtccctgcacaagaaaagaacttcacaactgctcctgccatttgtcatgatggaaaagcacactttcctcgtgaaggtgtctttgtttcaaatggcacacactggtttgtaacacaaaggaatttttatgaaccacaaatcattactacagacaacacatttgtgtctggtaactgtgatgttgtaataggaattgtcaacaacacagtttatgatcctttgcaacctgaattagactcattcaaggaggagttagataaatattttaagaatcatacatcaccagatgttgatttaggtgacatctctggcattaatgcttcagttgtaaacattcaaaaagaaattgaccgcctcaatgaggttgccaagaatttaaatgaatctctcatcgatctccaagaacttggaaagtatgagcagtatataaaatggccatggtacatttggctaggttttatagctggcttgattgccatagtaatggtgacaattatgctttgctgtatgaccagttgctgtagttgtctcaagggctgttgttcttgtggatcctgctgcaaatttgatgaagacgacggactgctcctatactgtaaggccagaagcacaccaatcacactaagcaaggatcaactgagtggtataaataatattgcatttagtaactaaataaaaatagcacctaatcatgttcttacaatggtttactatctgctcatagacaacccatctatcattggattttcttaaaatctgaacttcatcgaaactcttatctataaaccatctcacttacactatttaagtagattcctagtttatagttatataaaacacaattgaatgccagtcgaccttaccatctgtaaaaatgaaaactggggcaaatatgtcacgaaggaatccttgcaaatttgaaattcgaggtcattgcttaaatggtaagaggtgtcattttagtcataattattttgaatggccaccccatgcactgcttgtaagacaaaactttatgttaaacagaatacttaagtctatggataaaagtatagataccttatcagaaataagtggagctgcagagttggacagaacagaagagtatgctcttggtgtagttggagtgctagagagttatataggatcaataaacaatataactaaacaatcagcatgtgttgccatgagcaaactcctcactgaactcaatagtgatgatatcaaaaagctgagggacaatgaagagctaaattcacccaagataagagtgtacaatactgtcatatcatatattgaaagcaacaggaaaaacaataaacaaactatccatctgttaaaaagattgccagcagacgtattgaagaaaaccatcaaaaacacattggatatccataagagcataaccatcaacaacccaaaagaatcaactgttagtgatacaaatgaccatgccaaaaataatgatactacctgacaaatatccttgtagtataacttccatactaataacaagtagatgtagagttactatgtataatcaaaagaacacactatatttcaatcaaaacaacccaaataaccatatgtactcaccgaatcaaacattcaatgaaatccattggacctctcaagaattgattgacacaattcaaaattttctacaacatctaggtattattgaggatatatatacaatatatatattagtgtcataacactcaattctaacactcaccacatcgttacattattaattcaaacaattcaagttgtgggacaaaatggatcccattattaatggaaattctgctaatgtttatctaaccgatagttatttaaaaggtgttatctctttctcagagtgtaatgctttaggaagttacatattcaatggtccttatctcaaaaatgattataccaacttaattagtagacaaaatccattaatagaacacatgaatctaaagaaactaaatataacacagtccttaatatctaagtatcataaaggtgaaataaaattagaagaacctacttattttcagtcattacttatgacatacaagagtatgacctcgtcagaacagattgctaccactaatttacttaaaaagataataagaagagctatagaaataagtgatgtcaaagtctatgctatattgaataaactagggcttaaagaaaaggacaagattaaatccaacaatggacaagatgaagacaactcagttattacgaccataatcaaagatgatatactttcagctgttaaagataatcaatctcatcttaaagcagacaaaaatcactctacaaaacaaaaagacacaatcaaaacaacactcttgaagaaattgatgtgttcaatgcaacatcctccatcatggttaatacattggtttaacttatacacaaaattaaacaacatattaacacagtatcgatcaaatgaggtaaaaaaccatgggtttacattgatagataatcaaactcttagtggatttcaatttattttgaaccaatatggttgtatagtttatcataaggaactcaaaagaattactgtgacaacctataatcaattcttgacatggaaagatattagccttagtagattaaatgtttgtttaattacatggattagtaactgcttgaacacattaaataaaagcttaggcttaagatgcggattcaataatgttatcttgacacaactattcctttatggagattgtatactaaagctatttcacaatgaggggttctacataataaaagaggtagagggatttattatgtctctaattttaaatataacagaagaagatcaattcagaaaacgattttataatagtatgctcaacaacatcacagatgctgctaataaagctcagaaaaatctgctatcaagagtatgtcatacattattagataagacagtgtccgataatataataaatggcagatggataattctattaagtaagttccttaaattaattaagcttgcaggtgacaataaccttaacaatctgagtgaactatattttttgttcagaatatttggacacccaatggtagatgaaagacaagccatggatgctgttaaaattaattgcaatgagaccaaattttacttgttaagcagtctgagtatgttaagaggtgcctttatatatagaattataaaagggtttgtaaataattacaacagatggcctactttaagaaatgctattgttttacccttaagatggttaacttactataaactaaacacttatccttctttgttggaacttacagaaagagatttgattgtgttatcaggactacgtttctatcgtgagtttcggttgcctaaaaaagtggatcttgaaatgattataaatgataaagctatatcacctcctaaaaatttgatatggactagtttccctagaaattacatgccatcacacatacaaaactatatagaacatgaaaaattaaaattttccgagagtgataaatcaagaagagtattagagtattatttaagagataacaaattcaatgaatgtgatttatacaactgtgtagttaatcaaagttatctcaacaaccctaatcatgtggtatcattgacaggcaaagaaagagaactcagtgtaggtagaatgtttgcaatgcaaccgggaatgttcagacaggttcaaatattggcagagaaaatgatagctgaaaacattttacaattctttcctgaaagtcttacaagatatggtgatctagaactacaaaaaatattagaattgaaagcaggaataagtaacaaatcaaatcgctacaatgataattacaacaattacattagtaagtgctctatcatcacagatctcagcaaattcaatcaagcatttcgatatgaaacgtcatgtatttgtagtgatgtgctggatgaactgcatggtgtacaatctctattttcctggttacatttaactattcctcatgtcacaataatatgcacatataggcatgcacccccctatataggagatcatattgtagatcttaacaatgtagatgaacaaagtggattatatagatatcacatgggtggcatcgaagggtggtgtcaaaaactgtggaccatagaagctatatcactattggatctaatatctctcaaagggaaattctcaattactgctttaattaatggtgacaatcaatcaatagatataagcaaaccaatcagactcatggaaggtcaaactcatgctcaagcagattatttgctagcattaaatagccttaaattactgtataaagagtatgcaggcataggccacaaattaaaaggaactgagacttatatatcacgagatatgcaatttatgagtaaaacaattcaacataacggtgtatattacccagctagtataaagaaagtcctaagagtgggaccgtggataaacactatacttgatgatttcaaagtgagtctagaatctataggtagtttgacacaagaattagaatatagaggtgaaagtctattatgcagtttaatatttagaaatgtatggttatataatcagattgctctacaattaaaaaatcatgcattatgtaacaataaactatatttggacatattaaaggttctgaaacacttaaaaaccttttttaatcttgataatattgatacagcattaacattgtatatgaatttacccatgttatttggtggtggtgatcccaacttgttatatcgaagtttctatagaagaactcctgacttcctcacagaggctatagttcactctgtgttcatacttagttattatacaaaccatgacttaaaagataaacttcaagatctgtcagatgatagattgaataagttcttaacatgcataatcacgtttgacaaaaaccctaatgctgaattcgtaacattgatgagagatcctcaagctttagggtctgagagacaagctaaaattactagcgaaatcaatagactggcagttacagaggttttgagtacagctccaaacaaaatattctccaaaagtgcacaacattatactactacagagatagatctaaatgatattatgcaaaatatagaacctacatatcctcatgggctaagagttgtttatgaaagtttacccttttataaagcagagaaaatagtaaatcttatatcaggtacaaaatctataactaacatactggaaaaaacttctgccatagacttaacagatattgatagagccactgagatgatgaggaaaaacataactttgcttataaggatacttccattggattgtaacagagataaaagagagatattgagtatggaaaacctaagtattactgaattaagcaaatatgttagggaaagatcttggtctttatccaatatagttggtgttacatcacccagtatcatgtatacaatggacatcaaatatactacaagcactatatctagtggcataattatagagaaatataatgttaacagtttaacacgtggtgagagaggacccactaaaccatgggttggttcatctacacaagagaaaaaaacaatgccagtttataatagacaagtcttaaccaaaaaacagagagatcaaatagatctattagcaaaattggattgggtgtatgcatctatagataacaaggatgaattcatggaagaactcagcataggaacccttgggttaacatatgaaaaggccaagaaattatttccacaatatttaagtgtcaattatttgcatcgccttacagtcagtagtagaccatgtgaattccctgcatcaataccagcttatagaacaacaaattatcactttgacactagccctattaatcgcatattaacagaaaagtatggtgatgaagatattgacatagtattccaaaactgtataagctttggccttagtttaatgtcagtagtagaacaatttactaatgtatgtcctaacagaattattctcatacctaagcttaatgagatacatttgatgaaacctcccatattcacaggtgatgttgatattcacaagttaaaacaagtgatacaaaaacagcatatgtttttaccagacaaaataagtttgactcaatatgtggaattattcttaagtaataaaacactcaaatctggatctcatgttaattctaatttaatattggcacataaaatatctgactattttcataatacttacattttaagtactaatttagctggacattggattctgattatacaacttatgaaagattctaaaggtatttttgaaaaagattggggagagggatatataactgatcatatgtttattaatttgaaagttttcttcaatgcttataagacctatctcttgtgttttcataaaggttatggcaaagcaaagctggagtgtgatatgaacacttcagatcttctatgtgtattggaattaatagacagtagttattggaagtctatgtctaaggtatttttagaacaaaaagttatcaaatacattcttagccaagatgcaagtttacatagagtaaaaggatgtcatagcttcaaattatggtttcttaaacgtcttaatgtagcagaattcacagtttgcccttgggttgttaacatagattatcatccaacacatatgaaagcaatattaacttatatagatcttgttagaatgggattgataaatatagatagaatacacattaaaaataaacacaaattcaatgatgaattttatacttctaatctcttctacattaattataacttctcagataatactcatctattaactaaacatataaggattgctaattctgaattagaaaataattacaacaaattatatcatcctacaccagaaaccctagagaatatactagccaatccgattaaaagtaatgacaaaaagacactgaatgactattgtataggtaaaaatgttgactcaataatgttaccattgttatctaataagaagcttattaaatcgtctgcaatgattagaaccaattacagcaaacaagatttgtataatttattccctatggttgtgattgatagaattatagatcattcaggcaatacagccaaatccaaccaactttacactactacttcccaccaaatatctttagtgcacaatagcacatcactttactgcatgcttccttggcatcatattaatagattcaattttgtatttagttctacaggttgtaaaattagtatagagtatattttaaaagatcttaaaattaaagatcccaattgtatagcattcataggtgaaggagcagggaatttattattgcgtacagtagtggaacttcatcctgacataagatatatttacagaagtctgaaagattgcaatgatcatagtttacctattgagtttttaaggctgtacaatggacatatcaacattgattatggtgaaaatttgaccattcctgctacagatgcaaccaacaacattcattggtcttatttacatataaagtttgctgaacctatcagtctttttgtctgtgatgccgaattgtctgtaacagtcaactggagtaaaattataatagaatggagcaagcatgtaagaaagtgcaagtactgttcctcagttaataaatgtatgttaatagtaaaatatcatgctcaagatgatattgatttcaaattagacaatataactatattaaaaacttatgtatgcttaggcagtaagttaaagggatcggaggtttacttagtccttacaataggtcctgcgaatatattcccagtatttaatgtagtacaaaatgctaaattgatactatcaagaaccaaaaatttcatcatgcctaagaaagctgataaagagtctattgatgcaaatattaaaagtttgataccctttctttgttaccctataacaaaaaaaggaattaatactgcattgtcaaaactaaagagtgttgttagtggagatatactatcatattctatagctggacgtaatgaagttttcagcaataaacttataaatcataagcatatgaacatcttaaaatggttcaatcatgttttaaatttcagatcaacagaactaaactataaccatttatatatggtagaatctacatatccttacctaagtgaattgttaaacagcttgacaaccaatgaacttaaaaaactgattaaaatcacaggtagtctgttatacaactttcataatgaataatgaataaagatcttataataaaaattcccatagctatacactaacactgtattcaattatagttattaaaaattaaaaatcgtacgattttttaaataacttttagtgaactaatcctaaagttatcattttaatcttggaggaataaatttaaaccctaatctaattggtttatatgtgtattaactaaattacgagatattagtttttgacactttttttctcgtgggtcggcatggcatctccacctcctcgcggtccgacctgggcatccgaaggaggacgcacgtccactcggatggctaagggagctgctaacaaagcccgaaaggaagctgagttggctgctgccaccgctgagcaataactagcataaccccttggggcctctaaacgggtcttgaggggttttttgctgaaaggaggaactatatacgcgtaagcttctcgacccattctcatgtttgacagcttatcatcgaatttctgccattcatccgcttattatcacttattcaggcgtagcaaccaggcgtttaagggcaccaataactgccttaaaaaaattacgccccgccctgccactcatcgcagtactgttgtaattcattaagcattctgccgacatggaagccatcacagacggcatgatgaacctgaatcgccagcggcatcagcaccttgtcgccttgcgtataatatttgcccatggtgaaaacgggggcgaagaagttgtccatattggccacgtttaaatcaaaactggtgaaactcacccagggattggctgagacgaaaaacatattctcaataaaccctttagggaaataggccaggttttcaccgtaacacgccacatcttgcgaatatatgtgtagaaactgccggaaatcgtcgtggtattcactccagagcgatgaaaacgtttcagtttgctcatggaaaacggtgtaacaagggtgaacactatcccatatcaccagctcaccgtctttcattgccatacggaattccggatgagcattcatcaggcgggcaagaatgtgaataaaggccggataaaacttgtgcttatttttctttacggtctttaaaaaggccgtaatatccagctgaacggtctggttataggtacattgagcaactgactgaaatgcctcaaaatgttctttacgatgccattgggatatatcaacggtggtatatccagtgatttttttctccattttagcttccttagctcctgaaaatctcgataactcaaaaaatacgcccggtagtgatcttatttcattatggtgaaagttggaacctcttacgtgccgatcaacgtctcattttcgccaaaagttggcccagggcttcccggtatcaacagggacaccaggatttatttattctgcgaagtgatcttccgtcacaggtatttattcgcgataagctcatggagcggcgtaaccgtcgcacaggaaggacagagaaagcgcggatctgggaagtgacggacagaacggtcaggacctggattggggaggcggttgccgccgctgctgctgacggtgtgacgttctctgttccggtcacaccacatacgttccgccattcctatgcgatgcacatgctgtatgccggtataccgctgaaagttctgcaaagcctgatgggacataagtccatcagttcaacggaagtctacacgaaggtttttgcgctggatgtggctgcccggcaccgggtgcagtttgcgatgccggagtctgatgcggttgcgatgctgaaacaattatcctgagaataaatgccttggcctttatatggaaatgtggaactgagtggatatgctgtttttgtctgttaaacagagaagctggctgttatccactgagaagcgaacgaaacagtcgggaaaatctcccattatcgtagagatccgcattattaatctcaggagcctgtgtagcgtttataggaagtagtgttctgtcatgatgcctgcaagcggtaacgaaaacgatttgaatatgccttcaggaacaatagaaatcttcgtgcggtgttacgttgaagtggagcggattatgtcagcaatggacagaacaacctaatgaacacagaaccatgatgtggtctgtccttttacagccagtaggctcgccgcagtcgagcgacggcgaagccctcgagtgagcgaggaagcaccagggaacagcacttatatattctgcttacacacgatgcctgaaaaaacttcccttggggttatccacttatccacggggatatttttataattattttttttatagtttttagatcttcttttttagagcgccttgtaggcctttatccatgctggttctagagaaggtgttgtgacaaattgccctttcagtgtgacaaatcaccctcaaatgacagtcctgtctgtgacaaattgcccttaaccctgtgacaaattgccctcagaagaagctgttttttcacaaagttatccctgcttattgactcttttttatttagtgtgacaatctaaaaacttgtcacacttcacatggatctgtcatggcggaaacagcggttatcaatcacaagaaacgtaaaaatagcccgcgaatcgtccagtcaaacgacctcactgaggcggcatatagtctctcccgggatcaaaaacgtatgctgtatctgttcgttgaccagatcagaaaatctgatggcaccctacaggaacatgacggtatctgcgagatccatgttgctaaatatgctgaaatattcggattgacctctgcggaagccagtaaggatatacggcaggcattgaagagtttcgcggggaaggaagtggttttttatcgccctgaagaggatgccggcgatgaaaaaggctatgaatcttttccttggtttatcaaacgtgcgcacagtccatccagagggctttacagtgtacatatcaacccatatctcattcccttctttatcgggttacagaaccggtttacgcagtttcggcttagtgaaacaaaagaaatcaccaatccgtatgccatgcgtttatacgaatccctgtgtcagtatcgtaagccggatggctcaggcatcgtctctctgaaaatcgactggatcatagagcgttaccagctgcctcaaagttaccagcgtatgcctgacttccgccgccgcttcctgcaggtctgtgttaatgagatcaacagcagaactccaatgcgcctctcatacattgagaaaaagaaaggccgccagacgactcatatcgtattttccttccgcgatatcacttccatgacgacaggatagtctgagggttatctgtcacagatttgagggtggttcgtcacatttgttctgacctactgagggtaatttgtcacagttttgctgtttccttcagcctgcatggattttctcatactttttgaactgtaatttttaaggaagccaaatttgagggcagtttgtcacagttgatttccttctctttcccttcgtcatgtgacctgatatcgggggttagttcgtcatcattgatgagggttgattatcacagtttattactctgaattggctatccgcgtgtgtacctctacctggagtttttcccacggtggatatttcttcttgcgctgagcgtaagagctatctgacagaacagttcttctttgcttcctcgccagttcgctcgctatgctcggttacacggctgcggcgagcgctagtgataataagtgactgaggtatgtgctcttcttatctccttttgtagtgttgctcttattttaaacaactttgcggttttttgatgactttgcgattttgttgttgctttgcagtaaattgcaagatttaataaaaaaacgcaaagcaatgattaaaggatgttcagaatgaaactcatggaaacacttaaccagtgcataaacgctggtcatgaaatgacgaaggctatcgccattgcacagtttaatgatgacagcccggaagcgaggaaaataacccggcgctggagaataggtgaagcagcggatttagttggggtttcttctcaggctatcagagatgccgagaaagcagggcgactaccgcacccggatatggaaattcgaggacgggttgagcaacgtgttggttatacaattgaacaaattaatcatatgcgtgatgtgtttggtacgcgattgcgacgtgctgaagacgtatttccaccggtgatcggggttgctgcccataaaggtggcgtttacaaaacctcagtttctgttcatcttgctcaggatctggctctgaaggggctacgtgttttgctcgtggaaggtaacgacccccagggaacagcctcaatgtatcacggatgggtaccagatcttcatattcatgcagaagacactctcctgcctttctatcttggggaaaaggacgatgtcacttatgcaataaagcccacttgctggccggggcttgacattattccttcctgtctggctctgcaccgtattgaaactgagttaatgggcaaatttgatgaaggtaaactgcccaccgatccacacctgatgctccgactggccattgaaactgttgctcatgactatgatgtcatagttattgacagcgcgcctaacctgggtatcggcacgattaatgtcgtatgtgctgctgatgtgctgattgttcccacgcctgctgagttgtttgactacacctccgcactgcagtttttcgatatgcttcgtgatctgctcaagaacgttgatcttaaagggttcgagcctgatgtacgtattttgcttaccaaatacagcaatagtaatggctctcagtccccgtggatggaggagcaaattcgggatgcctggggaagcatggttctaaaaaatgttgtacgtgaaacggatgaagttggtaaaggtcagatccggatgagaactgtttttgaacaggccattgatcaacgctcttcaactggtgcctggagaaatgctctttctatttgggaacctgtctgcaatgaaattttcgatcgtctgattaaaccacgctgggagattagataatgaagcgtgcgcctgttattccaaaacatacgctcaatactcaaccggttgaagatacttcgttatcgacaccagctgccccgatggtggattcgttaattgcgcgcgtaggagtaatggctcgcggtaatgccattactttgcctgtatgtggtcgggatgtgaagtttactcttgaagtgctccggggtgatagtgttgagaagacctctcgggtatggtcaggtaatgaacgtgaccaggagctgcttactgaggacgcactggatgatctcatcccttcttttctactgactggtcaacagacaccggcgttcggtcgaagagtatctggtgtcatagaaattgccgatgggagtcgccgtcgtaaagctgctgcacttaccgaaagtgattatcgtgttctggttggcgagctggatgatgagcagatggctgcattatccagattgggtaacgattatcgcccaacaagtgcttatgaacgtggtcagcgttatgcaagccgattgcagaatgaatttgctggaaatatttctgcgctggctgatgcggaaaatatttcacgtaagattattacccgctgtatcaacaccgccaaattgcctaaatcagttgttgctcttttttctcaccccggtgaactatctgcccggtcaggtgatgcacttcaaaaagcctttacagataaagaggaattacttaagcagcaggcatctaaccttcatgagcagaaaaaagctggggtgatatttgaagctgaagaagttatcactcttttaacttctgtgcttaaaacgtcatctgcatcaagaactagtttaagctcacgacatcagtttgctcctggagcgacagtattgtataagggcgataaaatggtgcttaacctggacaggtctcgtgttccaactgagtgtatagagaaaattgaggccattcttaaggaacttgaaaagccagcaccctgatgcgaccacgttttagtctacgtttatctgtctttacttaatgtcctttgttacaggccagaaagcataactggcctgaatattctctctgggcccactgttccacttgtatcgtcggtctgataatcagactgggaccacggtcccactcgtatcgtcggtctgattattagtctgggaccacggtcccactcgtatcgtcggtctgattattagtctgggaccacggtcccactcgtatcgtcggtctgataatcagactgggaccacggtcccactcgtatcgtcggtctgattattagtctgggaccatggtcccactcgtatcgtcggtctgattattagtctgggaccacggtcccactcgtatcgtcggtctgattattagtctggaaccacggtcccactcgtatcgtcggtctgattattagtctgggaccacggtcccactcgtatcgtcggtctgattattagtctgggaccacgatcccactcgtgttgtcggtctgattatcggtctgggaccacggtcccacttgtattgtcgatcagactatcagcgtgagactacgattccatcaatgcctgtcaagggcaagtattgacatgtcgtcgtaacctgtagaacggagtaacctcggtgtgcggttgtatgcctgctgtggattgctgctgtgtcctgcttatccacaacattttgcgcacggttatgtggacaaaatacctggttacccaggccgtgccggcacgttaaccgggctgcatccgatgcaagtgtgtcgctgtcgagttt

SEQ ID NO: 92 - protein, 1290 aa, Artificial Sequence
  Description of Artificial Sequence: Synthetic polypeptide
MFVFLVLLPLVSSQCVNLTTRTQLPPAYTNSFTRGVYYPDKVFRSSVLHSTQDLFLPFFSNVTWFHAIHVSGTNGTKRFDNPVLPFNDGVYFASTEKSNIIRGWIFGTTLDSKTQSLLIVNNATNVVIKVCEFQFCNDPFLGVYYHKNNKSWMESEFRVYSSANNCTFEYVSQPFLMDLEGKQGNFKNLREFVFKNIDGYFKIYSKHTPINLVRDLPQGFSALEPLVDLPIGINITRFQTLLALHRSYLTPGDSSSGWTAGAAAYYVGYLQPRTFLLKYNENGTITDAVDCALDPLSETKCTLKSFTVEKGIYQTSNFRVQPTESIVRFPNITNLCPFGEVFNATRFASVYAWNRKRISNCVADYSVLYNSASFSTFKCYGVSPTKLNDLCFTNVYADSFVIRGDEVRQIAPGQTGKIADYNYKLPDDFTGCVIAWNSNNLDSKVGGNYNYLYRLFRKSNLKPFERDISTEIYQAGSTPCNGVEGFNCYFPLQSYGFQPTNGVGYQPYRVVVLSFELLHAPATVCGPKKSTNLVKNKCVNFNFNGLTGTGVLTESNKKFLPFQQFGRDIADTTDAVRDPQTLEILDITPCSFGGVSVITPGTNTSNQVAVLYQDVNCTEVPVAIHADQLTPTWRVYSTGSNVFQTRAGCLIGAEHVNNSYECDIPIGAGICASYQTQTNSPQRARSVASQSIIAYTMSLGAENSVAYSNNSIAIPTNFTISVTTEILPVSMTKTSVDCTMYICGDSTECSNLLLQYGSFCTQLNRALTGIAVEQDKNTQEVFAQVKQIYKTPPIKDFGGFNFSQILPDPSKPSKRSFIEDLLFNKVTLADAGFIKQYGDCLGDIAARDLICAQKFNGLTVLPPLLTDEMIAQYTSALLAGTITSGWTFGAGAALQIPFAMQMAYRFNGIGVTQNVLYENQKLIANQFNSAIGKIQDSLSSTASALGKLQDVVNQNAQALNTLVKQLSSNFGAISSVLNDILSRLDKVEAEVQIDRLITGRLQSLQTYVTQQLIRAAEIRASANLAATKMSECVLGQSKRVDFCGKGYHLMSFPQSAPHGVVFLHVTYVPAQEKNFTTAPAICHDGKAHFPREGVFVSNGTHWFVTQRNFYEPQIITTDNTFVSGNCDVVIGIVNNTVYDPLQPELDSFKEELDKYFKNHTSPDVDLGDISGINASVVNIQKEIDRLNEVAKNLNESLIDLQELGKYEQYIKWPWYIWLGFIAGLIAIVMVTIMLCCMTSCCSCLKGCCSCGSCCKFDEDDGLLLYCKARSTPITLSKDQLSGINNIAFSN

SEQ ID NO: 93 - DNA, 3873 bp, Artificial Sequence
  Description of Artificial Sequence: Synthetic polynucleotide
atgtttgtttttcttgttttattgccactagtctctagtcagtgtgttaatcttacaaccagaactcaattaccccctgcatacactaattctttcacacgtggtgtttattaccctgacaaagttttcagatcctcagttttacattcaactcaggacttgttcttacctttcttttccaatgttacttggttccatgctatacatgtctctgggaccaatggtactaagaggtttgataaccctgtcctaccatttaatgatggtgtttattttgcttccactgagaagtctaacataataagaggctggatttttggtactactttagattcgaagacccagtccctacttattgttaataacgctactaatgttgttattaaagtctgtgaatttcaattttgtaatgatccatttttgggtgtttattaccacaaaaacaacaaaagttggatggaaagtgagttcagagtttattctagtgcgaataattgcacttttgaatatgtctctcagccttttcttatggaccttgaaggaaaacagggtaatttcaaaaatcttagggaatttgtgtttaagaatattgatggttattttaaaatatattctaagcacacgcctattaatttagtgcgtgatctccctcagggtttttcggctttagaaccattggtagatttgccaataggtattaacatcactaggtttcaaactttacttgctttacatagaagttatttgactcctggtgattcttcttcaggttggacagctggtgctgcagcttattatgtgggttatcttcaacctaggacttttctattaaaatataatgaaaatggaaccattacagatgctgtagactgtgcacttgaccctctctcagaaacaaagtgtacgttgaaatccttcactgtagaaaaaggaatctatcaaacttctaactttagagtccaaccaacagaatctattgttagatttcctaatattacaaacttgtgcccttttggtgaagtttttaacgccaccagatttgcatctgtttatgcttggaacaggaagagaatcagcaactgtgttgctgattattctgtcctatataattccgcatcattttccacttttaagtgttatggagtgtctcctactaaattaaatgatctctgctttactaatgtctatgcagattcatttgtaattagaggtgatgaagtcagacaaatcgctccagggcaaactggaaagattgctgattataattataaattaccagatgattttacaggctgcgttatagcttggaattctaacaatcttgattctaaggttggtggtaattataattacctgtatagattgtttaggaagtctaatctcaaaccttttgagagagatatttcaactgaaatctatcaggccggtagcacaccttgtaatggtgttgaaggttttaattgttactttcctttacaatcatatggtttccaacccactaatggtgttggttaccaaccatacagagtagtagtactttcttttgaacttctacatgcaccagcaactgtttgtggacctaaaaagtctactaatttggttaaaaacaaatgtgtcaatttcaacttcaatggtttaacaggcacaggtgttcttactgagtctaacaaaaagtttctgcctttccaacaatttggcagagacattgctgacactactgatgctgtccgtgatccacagacacttgagattcttgacattacaccatgttcttttggtggtgtcagtgttataacaccaggaacaaatacttctaaccaggttgctgttctttatcaggatgttaactgcacagaagtccctgttgctattcatgcagatcaacttactcctacttggcgtgtttattctacaggttctaatgtttttcaaacacgtgcaggctgtttaataggggctgaacatgtcaacaactcatatgagtgtgacatacccattggtgcaggtatatgcgctagttatcagactcagactaattctcctcagcgggcacgtagtgtagctagtcaatccatcattgcctacactatgtcacttggtgcagaaaattcagttgcttactctaataactctattgccatacccacaaattttactattagtgttaccacagaaattctaccagtgtctatgaccaagacatcagtagattgtacaatgtacatttgtggtgattcaactgaatgcagcaatcttttgttgcaatatggcagtttttgtacacaattaaaccgtgctttaactggaatagctgttgaacaagacaaaaacacccaagaagtttttgcacaagtcaaacaaatttacaaaacaccaccaattaaagattttggtggttttaatttttcacaaatattaccagatccatcaaaaccaagcaagaggtcatttattgaagatctacttttcaacaaagtgacacttgcagatgctggcttcatcaaacaatatggtgattgccttggtgatattgctgctagagacctcatttgtgcacaaaagtttaacggccttactgttttgccacctttgctcacagatgaaatgattgctcaatacacttctgcactgttagcgggtacaatcacttctggttggacctttggtgcaggtgctgcattacaaataccatttgctatgcaaatggcttataggtttaatggtattggagttacacagaatgttctctatgagaaccaaaaattgattgccaaccaatttaatagtgctattggcaaaattcaagactcactttcttccacagcaagtgcacttggaaaacttcaagatgtggtcaaccaaaatgcacaagctttaaacacgcttgttaaacaacttagctccaattttggtgcaatttcaagtgttttaaatgatatcctttcacgtcttgacaaagttgaggctgaagtgcaaattgataggttgatcacaggcagacttcaaagtttgcagacatatgtgactcaacaattaattagagctgcagaaatcagagcttctgctaatcttgctgctactaaaatgtcagagtgtgtacttggacaatcaaaaagagttgatttttgtggaaagggctatcatcttatgtccttccctcagtcagcacctcatggtgtagtcttcttgcatgtgacttatgtccctgcacaagaaaagaacttcacaactgctcctgccatttgtcatgatggaaaagcacactttcctcgtgaaggtgtctttgtttcaaatggcacacactggtttgtaacacaaaggaatttttatgaaccacaaatcattactacagacaacacatttgtgtctggtaactgtgatgttgtaataggaattgtcaacaacacagtttatgatcctttgcaacctgaattagactcattcaaggaggagttagataaatattttaagaatcatacatcaccagatgttgatttaggtgacatctctggcattaatgcttcagttgtaaacattcaaaaagaaattgaccgcctcaatgaggttgccaagaatttaaatgaatctctcatcgatctccaagaacttggaaagtatgagcagtatataaaatggccatggtacatttggctaggttttatagctggcttgattgccatagtaatggtgacaattatgctttgctgtatgaccagttgctgtagttgtctcaagggctgttgttcttgtggatcctgctgcaaatttgatgaagacgacggactgctcctatactgtaaggccagaagcacaccaatcacactaagcaaggatcaactgagtggtataaataatattgcatttagtaactaa

SEQ ID NO: 94 - DNA, 16749 bp, Artificial Sequence
  Description of Artificial Sequence: Synthetic polynucleotide
acgcgaaaaaatgcgtacaacaaacttgcataaaccaaaaaaatggggcaaataagaatttgataagtaccacttaaatttaactcccttgcttagcgatggtgagcgagctgattaaggagaacatgcacatgaagctgtacatggagggcaccgtgaacaaccaccacttcaagtgcacatccgagggcgaaggcaagccctacgagggcacccagaccatgagaatcaaggcggtcgagggcggccctctccccttcgccttcgacatcctggctaccagcttcatgtacggcagcaaaaccttcatcaaccacacccagggcatccccgacttctttaagcagtccttccccgagggcttcacatgggagagagtcaccacatacgaagacgggggcgtgctgaccgctacccaggacaccagcctccaggacggctgcctcatctacaacgtcaagatcagaggggtgaacttcccatccaacggccctgtgatgcagaagaaaacactcggctgggaggcctccaccgagaccctgtaccccgctgacggcggcctggaaggcagagccgacatggccctgaagctcgtgggcgggggccacctgatctgcaacttgaagaccacatacagatccaagaaacccgctaagaacctcaagatgcccggcgtctactatgtggacagaagactggaaagaatcaaggaggccgacaaagagacctacgtcgagcagcacgaggtggctgtggccagatactgcgacctccctagcaaactggggcacagatgagtattcaattatagttattaaaaacttaacagaagacaaaaatggggcaaataagaatttgataagtaccacttaaatttaactcccttgcttagcgatgggttcgaattcgctatcgatgataaaagtacgtctacaaaatctatttgataatgatgaagtagcgctactaaaaataacgtgttatacggataaactaatacatctaacgaatgcgctagcgaaagcggtaatacatacgataaaactaaatggtatagtatttgtacatgtaataacgtcgtcggatatatgtccgaataataatatagtagtaaaatcgaattttacgacgatgccggtactacaaaatggtggttatatatgggaaatgatggaactaacgcattgttcgcaaccgaatggtctactagatgataattgtgaaataaaattttcgaaaaaactatcggattcgacgatgacgaattatatgaatcaactatcggaactactaggttttgatctaaatccgtaaattataattaatatcaactagcaaatcaatgtcactaacaccattagttaatataaaacttaacagaagacaaaaatggggcaaataaatcaattcagccaacccaaccatggatacgacgcataatgataatacgccgcaacgtctaatgataacggatatgcgtccgctatcgctagaaacgataataacgtcgctaacgcgtgatataataacgcataaatttatatatctaataaatcatgaatgtatagtacgtaaactagatgaacgtcaagcgacgtttacgtttctagtaaattatgaaatgaaactactacataaagtaggttcgacgaaatataaaaaatatacggaatataatacgaaatatggtacgtttccgatgccgatatttataaatcatgatggttttctagaatgtataggtataaaaccgacgaaacatacgccgataatatataaatatgatctaaatccgtaaatttcaacacaatattcacacaatctaaaacaacaactctatgcataactatactccatagtccagatggagcctgaaaattatagtaatttaaaattaaggagagatataagatagaagatggggcaaatacaaagatggctcttagcaaagtcaagttgaatgatacactcaacaaagatcaacttctgtcatccagcaaatacaccatccaacggagcacaggagatagtattgatactcctaattatgatgtgcagaaacacatcaataagttatgtggcatgttattaatcacagaagatgctaatcataaattcactgggttaataggtatgttatatgcgatgtctaggttaggaagagaagacaccataaaaatactcagagatgcgggatatcatgtaaaagcaaatggagtagatgtaacaacacatcgtcaagacattaatggaaaagaaatgaaatttgaagtgttaacattggcaagcttaacaactgaaattcaaatcaacattgagatagaatctagaaaatcctacaaaaaaatgctaaaagaaatgggagaggtagctccagaatacaggcatgactctcctgattgtgggatgataatattatgtatagcagcattagtaataactaaattagcagcaggggacagatctggtcttacagccgtgattaggagagctaataatgtcctaaaaaatgaaatgaaacgttacaaaggcttactacccaaggacatagccaacagcttctatgaagtgtttgaaaaacatccccactttatagatgtttttgttcattttggtatagcacaatcttctaccagaggtggcagtagagttgaagggatttttgcaggattgtttatgaatgcctatggtgcagggcaagtgatgttacggtggggagtcttagcaaaatcagttaaaaatattatgttaggacatgctagtgtgcaagcagaaatggaacaagttgttgaggtttatgaatatgcccaaaaattgggtggtgaagcaggattctaccatatattgaacaacccaaaagcatcattattatctttgactcaatttcctcacttctccagtgtagtattaggcaatgctgctggcctaggcataatgggagagtacagaggtacaccgaggaatcaagatctatatgatgcagcaaaggcatatgctgaacaactcaaagaaaatggtgtgattaactacagtgtactagacttgacagcagaagaactagaggctatcaaacatcagcttaatccaaaagataatgatgtagagctttgagttaataaaaaatggggcaaataaatcatcatggaaaagtttgctcctgaattccatggagaagatgcaaacaacagggctactaaattcctagaatcaataaagggcaaattcacatcacccaaagatcccaagaaaaaagatagtatcatatctgtcaactcaatagatatagaagtaaccaaagaaagccctataacatcaaattcaactattatcaacccaacaaatgagacagatgatactgcagggaacaagcccaattatcaaagaaaacctctagtaagtttcaaagaagaccctacaccaagtgataatcccttttctaaactatacaaagaaaccatagaaacatttgataacaatgaagaagaatccagctattcatacgaagaaataaatgatcagacaaacgataatataacagcaagattagataggattgatgaaaaattaagtgaaatactaggaatgcttcacacattagtagtggcaagtgcaggacctacatctgctcgggatggtataagagatgccatgattggtttaagagaagaaatgatagaaaaaatcagaactgaagcattaatgaccaatgacagattagaagctatggcaagactcaggaatgaggaaagtgaaaagatggcaaaagacacatcagatgaagtgtctctcaatccaacatcagagaaattgaacaacctattggaagggaatgatagtgacaatgatctatcacttgaagatttctgattagttaccactcttcacatcaacacacaataccaacagaagaccaacaaactaaccaacccaatcatccaaccaaacatccatccgccaatcagccaaacagccaacaaaacaaccagccaatccaaaactaaccacccggaaaaaatctataatatagttacaaaaaaaggaaagggtggggcaaatatggaaacatacgtgaacaagcttcacgaaggctccacatacacagctgctgttcaatacaatgtcttagaaaaagacgatgaccctgcatcacttacaatatgggtgcccatgttccaatcatctatgccagcagatttacttataaaagaactagctaatgtcaacatactagtgaaacaaatatccacacccaagggaccttcactaagagtcatgataaactcaagaagtgcagtgctagcacaaatgcccagcaaatttaccatatgcgctaatgtgtccttggatgaaagaagcaaactagcatatgatgtaaccacaccctgtgaaatcaaggcatgtagtctaacatgcctaaaatcaaaaaatatgttgactacagttaaagatctcactatgaagacactcaaccctacacatgatattattgctttatgtgaatttgaaaacatagtaacatcaaaaaaagtcataataccaacatacctaagatccatcagtgtcagaaataaagatctgaacacacttgaaaatataacaaccactgaattcaaaaatgctatcacaaatgcaaaaatcatcccttactcaggattactattagtcatcacagtgactgacaacaaaggagcattcaaatacataaagccacaaagtcaattcatagtagatcttggagcttacctagaaaaagaaagtatatattatgttaccacaaattggaagcacacagctacacgatttgcaatcaaacccatggaagattaacctttttcctctacatcagtgtgttaattcatacaaactttctacctacattcttcacttcaccatcacaatcacaaacactctgtggttcaaccaatcaaacaaaacttatctgaagtcccagatcatcccaagtcattgtttatcagatctagtactcaaataagttaataaaaaatatacacatggacgtccatggggcaaatgcaaacatgtttgtttttcttgttttattgccactagtctctagtcagtgtgttaatcttacaaccagaactcaattaccccctgcatacactaattctttcacacgtggtgtttattaccctgacaaagttttcagatcctcagttttacattcaactcaggacttgttcttacctttcttttccaatgttacttggttccatgctatacatgtctctgggaccaatggtactaagaggtttgataaccctgtcctaccatttaatgatggtgtttattttgcttccactgagaagtctaacataataagaggctggatttttggtactactttagattcgaagacccagtccctacttattgttaataacgctactaatgttgttattaaagtctgtgaatttcaattttgtaatgatccatttttgggtgtttattaccacaaaaacaacaaaagttggatggaaagtgagttcagagtttattctagtgcgaataattgcacttttgaatatgtctctcagccttttcttatggaccttgaaggaaaacagggtaatttcaaaaatcttagggaatttgtgtttaagaatattgatggttattttaaaatatattctaagcacacgcctattaatttagtgcgtgatctccctcagggtttttcggctttagaaccattggtagatttgccaataggtattaacatcactaggtttcaaactttacttgctttacatagaagttatttgactcctggtgattcttcttcaggttggacagctggtgctgcagcttattatgtgggttatcttcaacctaggacttttctattaaaatataatgaaaatggaaccattacagatgctgtagactgtgcacttgaccctctctcagaaacaaagtgtacgttgaaatccttcactgtagaaaaaggaatctatcaaacttctaactttagagtccaaccaacagaatctattgttagatttcctaatattacaaacttgtgcccttttggtgaagtttttaacgccaccagatttgcatctgtttatgcttggaacaggaagagaatcagcaactgtgttgctgattattctgtcctatataattccgcatcattttccacttttaagtgttatggagtgtctcctactaaattaaatgatctctgctttactaatgtctatgcagattcatttgtaattagaggtgatgaagtcagacaaatcgctccagggcaaactggaaagattgctgattataattataaattaccagatgattttacaggctgcgttatagcttggaattctaacaatcttgattctaaggttggtggtaattataattacctgtatagattgtttaggaagtctaatctcaaaccttttgagagagatatttcaactgaaatctatcaggccggtagcacaccttgtaatggtgttgaaggttttaattgttactttcctttacaatcatatggtttccaacccactaatggtgttggttaccaaccatacagagtagtagtactttcttttgaacttctacatgcaccagcaactgtttgtggacctaaaaagtctactaatttggttaaaaacaaatgtgtcaatttcaacttcaatggtttaacaggcacaggtgttcttactgagtctaacaaaaagtttctgcctttccaacaatttggcagagacattgctgacactactgatgctgtccgtgatccacagacacttgagattcttgacattacaccatgttcttttggtggtgtcagtgttataacaccaggaacaaatacttctaaccaggttgctgttctttatcaggatgttaactgcacagaagtccctgttgctattcatgcagatcaacttactcctacttggcgtgtttattctacaggttctaatgtttttcaaacacgtgcaggctgtttaataggggctgaacatgtcaacaactcatatgagtgtgacatacccattggtgcaggtatatgcgctagttatcagactcagactaattctcctcagcgggcacgtagtgtagctagtcaatccatcattgcctacactatgtcacttggtgcagaaaattcagttgcttactctaataactctattgccatacccacaaattttactattagtgttaccacagaaattctaccagtgtctatgaccaagacatcagtagattgtacaatgtacatttgtggtgattcaactgaatgcagcaatcttttgttgcaatatggcagtttttgtacacaattaaaccgtgctttaactggaatagctgttgaacaagacaaaaacacccaagaagtttttgcacaagtcaaacaaatttacaaaacaccaccaattaaagattttggtggttttaatttttcacaaatattaccagatccatcaaaaccaagcaagaggtcatttattgaagatctacttttcaacaaagtgacacttgcagatgctggcttcatcaaacaatatggtgattgccttggtgatattgctgctagagacctcatttgtgcacaaaagtttaacggccttactgttttgccacctttgctcacagatgaaatgattgctcaatacacttctgcactgttagcgggtacaatcacttctggttggacctttggtgcaggtgctgcattacaaataccatttgctatgcaaatggcttataggtttaatggtattggagttacacagaatgttctctatgagaaccaaaaattgattgccaaccaatttaatagtgctattggcaaaattcaagactcactttcttccacagcaagtgcacttggaaaacttcaagatgtggtcaaccaaaatgcacaagctttaaacacgcttgttaaacaacttagctccaattttggtgcaatttcaagtgttttaaatgatatcctttcacgtcttgacaaagttgaggctgaagtgcaaattgataggttgatcacaggcagacttcaaagtttgcagacatatgtgactcaacaattaattagagctgcagaaatcagagcttctgctaatcttgctgctactaaaatgtcagagtgtgtacttggacaatcaaaaagagttgatttttgtggaaagggctatcatcttatgtccttccctcagtcagcacctcatggtgtagtcttcttgcatgtgacttatgtccctgcacaagaaaagaacttcacaactgctcctgccatttgtcatgatggaaaagcacactttcctcgtgaaggtgtctttgtttcaaatggcacacactggtttgtaacacaaaggaatttttatgaaccacaaatcattactacagacaacacatttgtgtctggtaactgtgatgttgtaataggaattgtcaacaacacagtttatgatcctttgcaacctgaattagactcattcaaggaggagttagataaatattttaagaatcatacatcaccagatgttgatttaggtgacatctctggcattaatgcttcagttgtaaacattcaaaaagaaattgaccgcctcaatgaggttgccaagaatttaaatgaatctctcatcgatctccaagaacttggaaagtatgagcagtatataaaatggccatggtacatttggctaggttttatagctggcttgattgccatagtaatggtgacaattatgctttgctgtatgaccagttgctgtagttgtctcaagggctgttgttcttgtggatcctgctgcaaatttgatgaagacgacggactgctcctatactgtaaggccagaagcacaccaatcacactaagcaaggatcaactgagtggtataaataatattgcatttagtaactaaataaaaatagcacctaatcatgttcttacaatggtttactatctgctcatagacaacccatctatcattggattttcttaaaatctgaacttcatcgaaactcttatctataaaccatctcacttacactatttaagtagattcctagtttatagttatataaaacacaattgaatgccagtcgaccttaccatctgtaaaaatgaaaactggggcaaatatgtcacgaaggaatccttgcaaatttgaaattcgaggtcattgcttaaatggtaagaggtgtcattttagtcataattattttgaatggccaccccatgcactgcttgtaagacaaaactttatgttaaacagaatacttaagtctatggataaaagtatagataccttatcagaaataagtggagctgcagagttggacagaacagaagagtatgctcttggtgtagttggagtgctagagagttatataggatcaataaacaatataactaaacaatcagcatgtgttgccatgagcaaactcctcactgaactcaatagtgatgatatcaaaaagctgagggacaatgaagagctaaattcacccaagataagagtgtacaatactgtcatatcatatattgaaagcaacaggaaaaacaataaacaaactatccatctgttaaaaagattgccagcagacgtattgaagaaaaccatcaaaaacacattggatatccataagagcataaccatcaacaacccaaaagaatcaactgttagtgatacaaatgaccatgccaaaaataatgatactacctgacaaatatccttgtagtataacttccatactaataacaagtagatgtagagttactatgtataatcaaaagaacacactatatttcaatcaaaacaacccaaataaccatatgtactcaccgaatcaaacattcaatgaaatccattggacctctcaagaattgattgacacaattcaaaattttctacaacatctaggtattattgaggatatatatacaatatatatattagtgtcataacactcaattctaacactcaccacatcgttacattattaattcaaacaattcaagttgtgggacaaaatggatcccattattaatggaaattctgctaatgtttatctaaccgatagttatttaaaaggtgttatctctttctcagagtgtaatgctttaggaagttacatattcaatggtccttatctcaaaaatgattataccaacttaattagtagacaaaatccattaatagaacacatgaatctaaagaaactaaatataacacagtccttaatatctaagtatcataaaggtgaaataaaattagaagaacctacttattttcagtcattacttatgacatacaagagtatgacctcgtcagaacagattgctaccactaatttacttaaaaagataataagaagagctatagaaataagtgatgtcaaagtctatgctatattgaataaactagggcttaaagaaaaggacaagattaaatccaacaatggacaagatgaagacaactcagttattacgaccataatcaaagatgatatactttcagctgttaaagataatcaatctcatcttaaagcagacaaaaatcactctacaaaacaaaaagacacaatcaaaacaacactcttgaagaaattgatgtgttcaatgcaacatcctccatcatggttaatacattggtttaacttatacacaaaattaaacaacatattaacacagtatcgatcaaatgaggtaaaaaaccatgggtttacattgatagataatcaaactcttagtggatttcaatttattttgaaccaatatggttgtatagtttatcataaggaactcaaaagaattactgtgacaacctataatcaattcttgacatggaaagatattagccttagtagattaaatgtttgtttaattacatggattagtaactgcttgaacacattaaataaaagcttaggcttaagatgcggattcaataatgttatcttgacacaactattcctttatggagattgtatactaaagctatttcacaatgaggggttctacataataaaagaggtagagggatttattatgtctctaattttaaatataacagaagaagatcaattcagaaaacgattttataatagtatgctcaacaacatcacagatgctgctaataaagctcagaaaaatctgctatcaagagtatgtcatacattattagataagacagtgtccgataatataataaatggcagatggataattctattaagtaagttccttaaattaattaagcttgcaggtgacaataaccttaacaatctgagtgaactatattttttgttcagaatatttggacacccaatggtagatgaaagacaagccatggatgctgttaaaattaattgcaatgagaccaaattttacttgttaagcagtctgagtatgttaagaggtgcctttatatatagaattataaaagggtttgtaaataattacaacagatggcctactttaagaaatgctattgttttacccttaagatggttaacttactataaactaaacacttatccttctttgttggaacttacagaaagagatttgattgtgttatcaggactacgtttctatcgtgagtttcggttgcctaaaaaagtggatcttgaaatgattataaatgataaagctatatcacctcctaaaaatttgatatggactagtttccctagaaattacatgccatcacacatacaaaactatatagaacatgaaaaattaaaattttccgagagtgataaatcaagaagagtattagagtattatttaagagataacaaattcaatgaatgtgatttatacaactgtgtagttaatcaaagttatctcaacaaccctaatcatgtggtatcattgacaggcaaagaaagagaactcagtgtaggtagaatgtttgcaatgcaaccgggaatgttcagacaggttcaaatattggcagagaaaatgatagctgaaaacattttacaattctttcctgaaagtcttacaagatatggtgatctagaactacaaaaaatattagaattgaaagcaggaataagtaacaaatcaaatcgctacaatgataattacaacaattacattagtaagtgctctatcatcacagatctcagcaaattcaatcaagcatttcgatatgaaacgtcatgtatttgtagtgatgtgctggatgaactgcatggtgtacaatctctattttcctggttacatttaactattcctcatgtcacaataatatgcacatataggcatgcacccccctatataggagatcatattgtagatcttaacaatgtagatgaacaaagtggattatatagatatcacatgggtggcatcgaagggtggtgtcaaaaactgtggaccatagaagctatatcactattggatctaatatctctcaaagggaaattctcaattactgctttaattaatggtgacaatcaatcaatagatataagcaaaccaatcagactcatggaaggtcaaactcatgctcaagcagattatttgctagcattaaatagccttaaattactgtataaagagtatgcaggcataggccacaaattaaaaggaactgagacttatatatcacgagatatgcaatttatgagtaaaacaattcaacataacggtgtatattacccagctagtataaagaaagtcctaagagtgggaccgtggataaacactatacttgatgatttcaaagtgagtctagaatctataggtagtttgacacaagaattagaatatagaggtgaaagtctattatgcagtttaatatttagaaatgtatggttatataatcagattgctctacaattaaaaaatcatgcattatgtaacaataaactatatttggacatattaaaggttctgaaacacttaaaaaccttttttaatcttgataatattgatacagcattaacattgtatatgaatttacccatgttatttggtggtggtgatcccaacttgttatatcgaagtttctatagaagaactcctgacttcctcacagaggctatagttcactctgtgttcatacttagttattatacaaaccatgacttaaaagataaacttcaagatctgtcagatgatagattgaataagttcttaacatgcataatcacgtttgacaaaaaccctaatgctgaattcgtaacattgatgagagatcctcaagctttagggtctgagagacaagctaaaattactagcgaaatcaatagactggcagttacagaggttttgagtacagctccaaacaaaatattctccaaaagtgcacaacattatactactacagagatagatctaaatgatattatgcaaaatatagaacctacatatcctcatgggctaagagttgtttatgaaagtttacccttttataaagcagagaaaatagtaaatcttatatcaggtacaaaatctataactaacatactggaaaaaacttctgccatagacttaacagatattgatagagccactgagatgatgaggaaaaacataactttgcttataaggatacttccattggattgtaacagagataaaagagagatattgagtatggaaaacctaagtattactgaattaagcaaatatgttagggaaagatcttggtctttatccaatatagttggtgttacatcacccagtatcatgtatacaatggacatcaaatatactacaagcactatatctagtggcataattatagagaaatataatgttaacagtttaacacgtggtgagagaggacccactaaaccatgggttggttcatctacacaagagaaaaaaacaatgccagtttataatagacaagtcttaaccaaaaaacagagagatcaaatagatctattagcaaaattggattgggtgtatgcatctatagataacaaggatgaattcatggaagaactcagcataggaacccttgggttaacatatgaaaaggccaagaaattatttccacaatatttaagtgtcaattatttgcatcgccttacagtcagtagtagaccatgtgaattccctgcatcaataccagcttatagaacaacaaattatcactttgacactagccctattaatcgcatattaacagaaaagtatggtgatgaagatattgacatagtattccaaaactgtataagctttggccttagtttaatgtcagtagtagaacaatttactaatgtatgtcctaacagaattattctcatacctaagcttaatgagatacatttgatgaaacctcccatattcacaggtgatgttgatattcacaagttaaaacaagtgatacaaaaacagcatatgtttttaccagacaaaataagtttgactcaatatgtggaattattcttaagtaataaaacactcaaatctggatctcatgttaattctaatttaatattggcacataaaatatctgactattttcataatacttacattttaagtactaatttagctggacattggattctgattatacaacttatgaaagattctaaaggtatttttgaaaaagattggggagagggatatataactgatcatatgtttattaatttgaaagttttcttcaatgcttataagacctatctcttgtgttttcataaaggttatggcaaagcaaagctggagtgtgatatgaacacttcagatcttctatgtgtattggaattaatagacagtagttattggaagtctatgtctaaggtatttttagaacaaaaagttatcaaatacattcttagccaagatgcaagtttacatagagtaaaaggatgtcatagcttcaaattatggtttcttaaacgtcttaatgtagcagaattcacagtttgcccttgggttgttaacatagattatcatccaacacatatgaaagcaatattaacttatatagatcttgttagaatgggattgataaatatagatagaatacacattaaaaataaacacaaattcaatgatgaattttatacttctaatctcttctacattaattataacttctcagataatactcatctattaactaaacatataaggattgctaattctgaattagaaaataattacaacaaattatatcatcctacaccagaaaccctagagaatatactagccaatccgattaaaagtaatgacaaaaagacactgaatgactattgtataggtaaaaatgttgactcaataatgttaccattgttatctaataagaagcttattaaatcgtctgcaatgattagaaccaattacagcaaacaagatttgtataatttattccctatggttgtgattgatagaattatagatcattcaggcaatacagccaaatccaaccaactttacactactacttcccaccaaatatctttagtgcacaatagcacatcactttactgcatgcttccttggcatcatattaatagattcaattttgtatttagttctacaggttgtaaaattagtatagagtatattttaaaagatcttaaaattaaagatcccaattgtatagcattcataggtgaaggagcagggaatttattattgcgtacagtagtggaacttcatcctgacataagatatatttacagaagtctgaaagattgcaatgatcatagtttacctattgagtttttaaggctgtacaatggacatatcaacattgattatggtgaaaatttgaccattcctgctacagatgcaaccaacaacattcattggtcttatttacatataaagtttgctgaacctatcagtctttttgtctgtgatgccgaattgtctgtaacagtcaactggagtaaaattataatagaatggagcaagcatgtaagaaagtgcaagtactgttcctcagttaataaatgtatgttaatagtaaaatatcatgctcaagatgatattgatttcaaattagacaatataactatattaaaaacttatgtatgcttaggcagtaagttaaagggatcggaggtttacttagtccttacaataggtcctgcgaatatattcccagtatttaatgtagtacaaaatgctaaattgatactatcaagaaccaaaaatttcatcatgcctaagaaagctgataaagagtctattgatgcaaatattaaaagtttgataccctttctttgttaccctataacaaaaaaaggaattaatactgcattgtcaaaactaaagagtgttgttagtggagatatactatcatattctatagctggacgtaatgaagttttcagcaataaacttataaatcataagcatatgaacatcttaaaatggttcaatcatgttttaaatttcagatcaacagaactaaactataaccatttatatatggtagaatctacatatccttacctaagtgaattgttaaacagcttgacaaccaatgaacttaaaaaactgattaaaatcacaggtagtctgttatacaactttcataatgaataatgaataaagatcttataataaaaattcccatagctatacactaacactgtattcaattatagttattaaaaattaaaaatcgtacgattttttaaataacttttagtgaactaatcctaaagttatcattttaatcttggaggaataaatttaaaccctaatctaattggtttatatgtgtattaactaaattacgagatattagtttttgacactttttttctcgt

SEQ ID NO: 95 - DNA, 15953 bp, Artificial Sequence
  Description of Artificial Sequence: Synthetic polynucleotide
acgcgaaaaaatgcgtacaacaaacttgcataaaccaaaaaaatggggcaaataagaatttgataagtaccacttaaatttaactcccttgcttagcgatgggttcgaattcgctatcgatgataaaagtacgtctacaaaatctatttgataatgatgaagtagcgctactaaaaataacgtgttatacggataaactaatacatctaacgaatgcgctagcgaaagcggtaatacatacgataaaactaaatggtatagtatttgtacatgtaataacgtcgtcggatatatgtccgaataataatatagtagtaaaatcgaattttacgacgatgccggtactacaaaatggtggttatatatgggaaatgatggaactaacgcattgttcgcaaccgaatggtctactagatgataattgtgaaataaaattttcgaaaaaactatcggattcgacgatgacgaattatatgaatcaactatcggaactactaggttttgatctaaatccgtaaattataattaatatcaactagcaaatcaatgtcactaacaccattagttaatataaaacttaacagaagacaaaaatggggcaaataaatcaattcagccaacccaaccatggatacgacgcataatgataatacgccgcaacgtctaatgataacggatatgcgtccgctatcgctagaaacgataataacgtcgctaacgcgtgatataataacgcataaatttatatatctaataaatcatgaatgtatagtacgtaaactagatgaacgtcaagcgacgtttacgtttctagtaaattatgaaatgaaactactacataaagtaggttcgacgaaatataaaaaatatacggaatataatacgaaatatggtacgtttccgatgccgatatttataaatcatgatggttttctagaatgtataggtataaaaccgacgaaacatacgccgataatatataaatatgatctaaatccgtaaatttcaacacaatattcacacaatctaaaacaacaactctatgcataactatactccatagtccagatggagcctgaaaattatagtaatttaaaattaaggagagatataagatagaagatggggcaaatacaaagatggctcttagcaaagtcaagttgaatgatacactcaacaaagatcaacttctgtcatccagcaaatacaccatccaacggagcacaggagatagtattgatactcctaattatgatgtgcagaaacacatcaataagttatgtggcatgttattaatcacagaagatgctaatcataaattcactgggttaataggtatgttatatgcgatgtctaggttaggaagagaagacaccataaaaatactcagagatgcgggatatcatgtaaaagcaaatggagtagatgtaacaacacatcgtcaagacattaatggaaaagaaatgaaatttgaagtgttaacattggcaagcttaacaactgaaattcaaatcaacattgagatagaatctagaaaatcctacaaaaaaatgctaaaagaaatgggagaggtagctccagaatacaggcatgactctcctgattgtgggatgataatattatgtatagcagcattagtaataactaaattagcagcaggggacagatctggtcttacagccgtgattaggagagctaataatgtcctaaaaaatgaaatgaaacgttacaaaggcttactacccaaggacatagccaacagcttctatgaagtgtttgaaaaacatccccactttatagatgtttttgttcattttggtatagcacaatcttctaccagaggtggcagtagagttgaagggatttttgcaggattgtttatgaatgcctatggtgcagggcaagtgatgttacggtggggagtcttagcaaaatcagttaaaaatattatgttaggacatgctagtgtgcaagcagaaatggaacaagttgttgaggtttatgaatatgcccaaaaattgggtggtgaagcaggattctaccatatattgaacaacccaaaagcatcattattatctttgactcaatttcctcacttctccagtgtagtattaggcaatgctgctggcctaggcataatgggagagtacagaggtacaccgaggaatcaagatctatatgatgcagcaaaggcatatgctgaacaactcaaagaaaatggtgtgattaactacagtgtactagacttgacagcagaagaactagaggctatcaaacatcagcttaatccaaaagataatgatgtagagctttgagttaataaaaaatggggcaaataaatcatcatggaaaagtttgctcctgaattccatggagaagatgcaaacaacagggctactaaattcctagaatcaataaagggcaaattcacatcacccaaagatcccaagaaaaaagatagtatcatatctgtcaactcaatagatatagaagtaaccaaagaaagccctataacatcaaattcaactattatcaacccaacaaatgagacagatgatactgcagggaacaagcccaattatcaaagaaaacctctagtaagtttcaaagaagaccctacaccaagtgataatcccttttctaaactatacaaagaaaccatagaaacatttgataacaatgaagaagaatccagctattcatacgaagaaataaatgatcagacaaacgataatataacagcaagattagataggattgatgaaaaattaagtgaaatactaggaatgcttcacacattagtagtggcaagtgcaggacctacatctgctcgggatggtataagagatgccatgattggtttaagagaagaaatgatagaaaaaatcagaactgaagcattaatgaccaatgacagattagaagctatggcaagactcaggaatgaggaaagtgaaaagatggcaaaagacacatcagatgaagtgtctctcaatccaacatcagagaaattgaacaacctattggaagggaatgatagtgacaatgatctatcacttgaagatttctgattagttaccactcttcacatcaacacacaataccaacagaagaccaacaaactaaccaacccaatcatccaaccaaacatccatccgccaatcagccaaacagccaacaaaacaaccagccaatccaaaactaaccacccggaaaaaatctataatatagttacaaaaaaaggaaagggtggggcaaatatggaaacatacgtgaacaagcttcacgaaggctccacatacacagctgctgttcaatacaatgtcttagaaaaagacgatgaccctgcatcacttacaatatgggtgcccatgttccaatcatctatgccagcagatttacttataaaagaactagctaatgtcaacatactagtgaaacaaatatccacacccaagggaccttcactaagagtcatgataaactcaagaagtgcagtgctagcacaaatgcccagcaaatttaccatatgcgctaatgtgtccttggatgaaagaagcaaactagcatatgatgtaaccacaccctgtgaaatcaaggcatgtagtctaacatgcctaaaatcaaaaaatatgttgactacagttaaagatctcactatgaagacactcaaccctacacatgatattattgctttatgtgaatttgaaaacatagtaacatcaaaaaaagtcataataccaacatacctaagatccatcagtgtcagaaataaagatctgaacacacttgaaaatataacaaccactgaattcaaaaatgctatcacaaatgcaaaaatcatcccttactcaggattactattagtcatcacagtgactgacaacaaaggagcattcaaatacataaagccacaaagtcaattcatagtagatcttggagcttacctagaaaaagaaagtatatattatgttaccacaaattggaagcacacagctacacgatttgcaatcaaacccatggaagattaacctttttcctctacatcagtgtgttaattcatacaaactttctacctacattcttcacttcaccatcacaatcacaaacactctgtggttcaaccaatcaaacaaaacttatctgaagtcccagatcatcccaagtcattgtttatcagatctagtactcaaataagttaataaaaaatatacacatggacgtccatggggcaaatgcaaacatgtttgtttttcttgttttattgccactagtctctagtcagtgtgttaatcttacaaccagaactcaattaccccctgcatacactaattctttcacacgtggtgtttattaccctgacaaagttttcagatcctcagttttacattcaactcaggacttgttcttacctttcttttccaatgttacttggttccatgctatacatgtctctgggaccaatggtactaagaggtttgataaccctgtcctaccatttaatgatggtgtttattttgcttccactgagaagtctaacataataagaggctggatttttggtactactttagattcgaagacccagtccctacttattgttaataacgctactaatgttgttattaaagtctgtgaatttcaattttgtaatgatccatttttgggtgtttattaccacaaaaacaacaaaagttggatggaaagtgagttcagagtttattctagtgcgaataattgcacttttgaatatgtctctcagccttttcttatggaccttgaaggaaaacagggtaatttcaaaaatcttagggaatttgtgtttaagaatattgatggttattttaaaatatattctaagcacacgcctattaatttagtgcgtgatctccctcagggtttttcggctttagaaccattggtagatttgccaataggtattaacatcactaggtttcaaactttacttgctttacatagaagttatttgactcctggtgattcttcttcaggttggacagctggtgctgcagcttattatgtgggttatcttcaacctaggacttttctattaaaatataatgaaaatggaaccattacagatgctgtagactgtgcacttgaccctctctcagaaacaaagtgtacgttgaaatccttcactgtagaaaaaggaatctatcaaacttctaactttagagtccaaccaacagaatctattgttagatttcctaatattacaaacttgtgcccttttggtgaagtttttaacgccaccagatttgcatctgtttatgcttggaacaggaagagaatcagcaactgtgttgctgattattctgtcctatataattccgcatcattttccacttttaagtgttatggagtgtctcctactaaattaaatgatctctgctttactaatgtctatgcagattcatttgtaattagaggtgatgaagtcagacaaatcgctccagggcaaactggaaagattgctgattataattataaattaccagatgattttacaggctgcgttatagcttggaattctaacaatcttgattctaaggttggtggtaattataattacctgtatagattgtttaggaagtctaatctcaaaccttttgagagagatatttcaactgaaatctatcaggccggtagcacaccttgtaatggtgttgaaggttttaattgttactttcctttacaatcatatggtttccaacccactaatggtgttggttaccaaccatacagagtagtagtactttcttttgaacttctacatgcaccagcaactgtttgtggacctaaaaagtctactaatttggttaaaaacaaatgtgtcaatttcaacttcaatggtttaacaggcacaggtgttcttactgagtctaacaaaaagtttctgcctttccaacaatttggcagagacattgctgacactactgatgctgtccgtgatccacagacacttgagattcttgacattacaccatgttcttttggtggtgtcagtgttataacaccaggaacaaatacttctaaccaggttgctgttctttatcaggatgttaactgcacagaagtccctgttgctattcatgcagatcaacttactcctacttggcgtgtttattctacaggttctaatgtttttcaaacacgtgcaggctgtttaataggggctgaacatgtcaacaactcatatgagtgtgacatacccattggtgcaggtatatgcgctagttatcagactcagactaattctcctcagcgggcacgtagtgtagctagtcaatccatcattgcctacactatgtcacttggtgcagaaaattcagttgcttactctaataactctattgccatacccacaaattttactattagtgttaccacagaaattctaccagtgtctatgaccaagacatcagtagattgtacaatgtacatttgtggtgattcaactgaatgcagcaatcttttgttgcaatatggcagtttttgtacacaattaaaccgtgctttaactggaatagctgttgaacaagacaaaaacacccaagaagtttttgcacaagtcaaacaaatttacaaaacaccaccaattaaagattttggtggttttaatttttcacaaatattaccagatccatcaaaaccaagcaagaggtcatttattgaagatctacttttcaacaaagtgacacttgcagatgctggcttcatcaaacaatatggtgattgccttggtgatattgctgctagagacctcatttgtgcacaaaagtttaacggccttactgttttgccacctttgctcacagatgaaatgattgctcaatacacttctgcactgttagcgggtacaatcacttctggttggacctttggtgcaggtgctgcattacaaataccatttgctatgcaaatggcttataggtttaatggtattggagttacacagaatgttctctatgagaaccaaaaattgattgccaaccaatttaatagtgctattggcaaaattcaagactcactttcttccacagcaagtgcacttggaaaacttcaagatgtggtcaaccaaaatgcacaagctttaaacacgcttgttaaacaacttagctccaattttggtgcaatttcaagtgttttaaatgatatcctttcacgtcttgacaaagttgaggctgaagtgcaaattgataggttgatcacaggcagacttcaaagtttgcagacatatgtgactcaacaattaattagagctgcagaaatcagagcttctgctaatcttgctgctactaaaatgtcagagtgtgtacttggacaatcaaaaagagttgatttttgtggaaagggctatcatcttatgtccttccctcagtcagcacctcatggtgtagtcttcttgcatgtgacttatgtccctgcacaagaaaagaacttcacaactgctcctgccatttgtcatgatggaaaagcacactttcctcgtgaaggtgtctttgtttcaaatggcacacactggtttgtaacacaaaggaatttttatgaaccacaaatcattactacagacaacacatttgtgtctggtaactgtgatgttgtaataggaattgtcaacaacacagtttatgatcctttgcaacctgaattagactcattcaaggaggagttagataaatattttaagaatcatacatcaccagatgttgatttaggtgacatctctggcattaatgcttcagttgtaaacattcaaaaagaaattgaccgcctcaatgaggttgccaagaatttaaatgaatctctcatcgatctccaagaacttggaaagtatgagcagtatataaaatggccatggtacatttggctaggttttatagctggcttgattgccatagtaatggtgacaattatgctttgctgtatgaccagttgctgtagttgtctcaagggctgttgttcttgtggatcctgctgcaaatttgatgaagacgacggactgctcctatactgtaaggccagaagcacaccaatcacactaagcaaggatcaactgagtggtataaataatattgcatttagtaactaaataaaaatagcacctaatcatgttcttacaatggtttactatctgctcatagacaacccatctatcattggattttcttaaaatctgaacttcatcgaaactcttatctataaaccatctcacttacactatttaagtagattcctagtttatagttatataaaacacaattgaatgccagtcgaccttaccatctgtaaaaatgaaaactggggcaaatatgtcacgaaggaatccttgcaaatttgaaattcgaggtcattgcttaaatggtaagaggtgtcattttagtcataattattttgaatggccaccccatgcactgcttgtaagacaaaactttatgttaaacagaatacttaagtctatggataaaagtatagataccttatcagaaataagtggagctgcagagttggacagaacagaagagtatgctcttggtgtagttggagtgctagagagttatataggatcaataaacaatataactaaacaatcagcatgtgttgccatgagcaaactcctcactgaactcaatagtgatgatatcaaaaagctgagggacaatgaagagctaaattcacccaagataagagtgtacaatactgtcatatcatatattgaaagcaacaggaaaaacaataaacaaactatccatctgttaaaaagattgccagcagacgtattgaagaaaaccatcaaaaacacattggatatccataagagcataaccatcaacaacccaaaagaatcaactgttagtgatacaaatgaccatgccaaaaataatgatactacctgacaaatatccttgtagtataacttccatactaataacaagtagatgtagagttactatgtataatcaaaagaacacactatatttcaatcaaaacaacccaaataaccatatgtactcaccgaatcaaacattcaatgaaatccattggacctctcaagaattgattgacacaattcaaaattttctacaacatctaggtattattgaggatatatatacaatatatatattagtgtcataacactcaattctaacactcaccacatcgttacattattaattcaaacaattcaagttgtgggacaaaatggatcccattattaatggaaattctgctaatgtttatctaaccgatagttatttaaaaggtgttatctctttctcagagtgtaatgctttaggaagttacatattcaatggtccttatctcaaaaatgattataccaacttaattagtagacaaaatccattaatagaacacatgaatctaaagaaactaaatataacacagtccttaatatctaagtatcataaaggtgaaataaaattagaagaacctacttattttcagtcattacttatgacatacaagagtatgacctcgtcagaacagattgctaccactaatttacttaaaaagataataagaagagctatagaaataagtgatgtcaaagtctatgctatattgaataaactagggcttaaagaaaaggacaagattaaatccaacaatggacaagatgaagacaactcagttattacgaccataatcaaagatgatatactttcagctgttaaagataatcaatctcatcttaaagcagacaaaaatcactctacaaaacaaaaagacacaatcaaaacaacactcttgaagaaattgatgtgttcaatgcaacatcctccatcatggttaatacattggtttaacttatacacaaaattaaacaacatattaacacagtatcgatcaaatgaggtaaaaaaccatgggtttacattgatagataatcaaactcttagtggatttcaatttattttgaaccaatatggttgtatagtttatcataaggaactcaaaagaattactgtgacaacctataatcaattcttgacatggaaagatattagccttagtagattaaatgtttgtttaattacatggattagtaactgcttgaacacattaaataaaagcttaggcttaagatgcggattcaataatgttatcttgacacaactattcctttatggagattgtatactaaagctatttcacaatgaggggttctacataataaaagaggtagagggatttattatgtctctaattttaaatataacagaagaagatcaattcagaaaacgattttataatagtatgctcaacaacatcacagatgctgctaataaagctcagaaaaatctgctatcaagagtatgtcatacattattagataagacagtgtccgataatataataaatggcagatggataattctattaagtaagttccttaaattaattaagcttgcaggtgacaataaccttaacaatctgagtgaactatattttttgttcagaatatttggacacccaatggtagatgaaagacaagccatggatgctgttaaaattaattgcaatgagaccaaattttacttgttaagcagtctgagtatgttaagaggtgcctttatatatagaattataaaagggtttgtaaataattacaacagatggcctactttaagaaatgctattgttttacccttaagatggttaacttactataaactaaacacttatccttctttgttggaacttacagaaagagatttgattgtgttatcaggactacgtttctatcgtgagtttcggttgcctaaaaaagtggatcttgaaatgattataaatgataaagctatatcacctcctaaaaatttgatatggactagtttccctagaaattacatgccatcacacatacaaaactatatagaacatgaaaaattaaaattttccgagagtgataaatcaagaagagtattagagtattatttaagagataacaaattcaatgaatgtgatttatacaactgtgtagttaatcaaagttatctcaacaaccctaatcatgtggtatcattgacaggcaaagaaagagaactcagtgtaggtagaatgtttgcaatgcaaccgggaatgttcagacaggttcaaatattggcagagaaaatgatagctgaaaacattttacaattctttcctgaaagtcttacaagatatggtgatctagaactacaaaaaatattagaattgaaagcaggaataagtaacaaatcaaatcgctacaatgataattacaacaattacattagtaagtgctctatcatcacagatctcagcaaattcaatcaagcatttcgatatgaaacgtcatgtatttgtagtgatgtgctggatgaactgcatggtgtacaatctctattttcctggttacatttaactattcctcatgtcacaataatatgcacatataggcatgcacccccctatataggagatcatattgtagatcttaacaatgtagatgaacaaagtggattatatagatatcacatgggtggcatcgaagggtggtgtcaaaaactgtggaccatagaagctatatcactattggatctaatatctctcaaagggaaattctcaattactgctttaattaatggtgacaatcaatcaatagatataagcaaaccaatcagactcatggaaggtcaaactcatgctcaagcagattatttgctagcattaaatagccttaaattactgtataaagagtatgcaggcataggccacaaattaaaaggaactgagacttatatatcacgagatatgcaatttatgagtaaaacaattcaacataacggtgtatattacccagctagtataaagaaagtcctaagagtgggaccgtggataaacactatacttgatgatttcaaagtgagtctagaatctataggtagtttgacacaagaattagaatatagaggtgaaagtctattatgcagtttaatatttagaaatgtatggttatataatcagattgctctacaattaaaaaatcatgcattatgtaacaataaactatatttggacatattaaaggttctgaaacacttaaaaaccttttttaatcttgataatattgatacagcattaacattgtatatgaatttacccatgttatttggtggtggtgatcccaacttgttatatcgaagtttctatagaagaactcctgacttcctcacagaggctatagttcactctgtgttcatacttagttattatacaaaccatgacttaaaagataaacttcaagatctgtcagatgatagattgaataagttcttaacatgcataatcacgtttgacaaaaaccctaatgctgaattcgtaacattgatgagagatcctcaagctttagggtctgagagacaagctaaaattactagcgaaatcaatagactggcagttacagaggttttgagtacagctccaaacaaaatattctccaaaagtgcacaacattatactactacagagatagatctaaatgatattatgcaaaatatagaacctacatatcctcatgggctaagagttgtttatgaaagtttacccttttataaagcagagaaaatagtaaatcttatatcaggtacaaaatctataactaacatactggaaaaaacttctgccatagacttaacagatattgatagagccactgagatgatgaggaaaaacataactttgcttataaggatacttccattggattgtaacagagataaaagagagatattgagtatggaaaacctaagtattactgaattaagcaaatatgttagggaaagatcttggtctttatccaatatagttggtgttacatcacccagtatcatgtatacaatggacatcaaatatactacaagcactatatctagtggcataattatagagaaatataatgttaacagtttaacacgtggtgagagaggacccactaaaccatgggttggttcatctacacaagagaaaaaaacaatgccagtttataatagacaagtcttaaccaaaaaacagagagatcaaatagatctattagcaaaattggattgggtgtatgcatctatagataacaaggatgaattcatggaagaactcagcataggaacccttgggttaacatatgaaaaggccaagaaattatttccacaatatttaagtgtcaattatttgcatcgccttacagtcagtagtagaccatgtgaattccctgcatcaataccagcttatagaacaacaaattatcactttgacactagccctattaatcgcatattaacagaaaagtatggtgatgaagatattgacatagtattccaaaactgtataagctttggccttagtttaatgtcagtagtagaacaatttactaatgtatgtcctaacagaattattctcatacctaagcttaatgagatacatttgatgaaacctcccatattcacaggtgatgttgatattcacaagttaaaacaagtgatacaaaaacagcatatgtttttaccagacaaaataagtttgactcaatatgtggaattattcttaagtaataaaacactcaaatctggatctcatgttaattctaatttaatattggcacataaaatatctgactattttcataatacttacattttaagtactaatttagctggacattggattctgattatacaacttatgaaagattctaaaggtatttttgaaaaagattggggagagggatatataactgatcatatgtttattaatttgaaagttttcttcaatgcttataagacctatctcttgtgttttcataaaggttatggcaaagcaaagctggagtgtgatatgaacacttcagatcttctatgtgtattggaattaatagacagtagttattggaagtctatgtctaaggtatttttagaacaaaaagttatcaaatacattcttagccaagatgcaagtttacatagagtaaaaggatgtcatagcttcaaattatggtttcttaaacgtcttaatgtagcagaattcacagtttgcccttgggttgttaacatagattatcatccaacacatatgaaagcaatattaacttatatagatcttgttagaatgggattgataaatatagatagaatacacattaaaaataaacacaaattcaatgatgaattttatacttctaatctcttctacattaattataacttctcagataatactcatctattaactaaacatataaggattgctaattctgaattagaaaataattacaacaaattatatcatcctacaccagaaaccctagagaatatactagccaatccgattaaaagtaatgacaaaaagacactgaatgactattgtataggtaaaaatgttgactcaataatgttaccattgttatctaataagaagcttattaaatcgtctgcaatgattagaaccaattacagcaaacaagatttgtataatttattccctatggttgtgattgatagaattatagatcattcaggcaatacagccaaatccaaccaactttacactactacttcccaccaaatatctttagtgcacaatagcacatcactttactgcatgcttccttggcatcatattaatagattcaattttgtatttagttctacaggttgtaaaattagtatagagtatattttaaaagatcttaaaattaaagatcccaattgtatagcattcataggtgaaggagcagggaatttattattgcgtacagtagtggaacttcatcctgacataagatatatttacagaagtctgaaagattgcaatgatcatagtttacctattgagtttttaaggctgtacaatggacatatcaacattgattatggtgaaaatttgaccattcctgctacagatgcaaccaacaacattcattggtcttatttacatataaagtttgctgaacctatcagtctttttgtctgtgatgccgaattgtctgtaacagtcaactggagtaaaattataatagaatggagcaagcatgtaagaaagtgcaagtactgttcctcagttaataaatgtatgttaatagtaaaatatcatgctcaagatgatattgatttcaaattagacaatataactatattaaaaacttatgtatgcttaggcagtaagttaaagggatcggaggtttacttagtccttacaataggtcctgcgaatatattcccagtatttaatgtagtacaaaatgctaaattgatactatcaagaaccaaaaatttcatcatgcctaagaaagctgataaagagtctattgatgcaaatattaaaagtttgataccctttctttgttaccctataacaaaaaaaggaattaatactgcattgtcaaaactaaagagtgttgttagtggagatatactatcatattctatagctggacgtaatgaagttttcagcaataaacttataaatcataagcatatgaacatcttaaaatggttcaatcatgttttaaatttcagatcaacagaactaaactataaccatttatatatggtagaatctacatatccttacctaagtgaattgttaaacagcttgacaaccaatgaacttaaaaaactgattaaaatcacaggtagtctgttatacaactttcataatgaataatgaataaagatcttataataaaaattcccatagctatacactaacactgtattcaattatagttattaaaaattaaaaatcgtacgattttttaaataacttttagtgaactaatcctaaagttatcattttaatcttggaggaataaatttaaaccctaatctaattggtttatatgtgtattaactaaattacgagatattagtttttgacactttttttctcgt

SEQ ID NO: 96 - DNA, 23452 bp, Artificial Sequence
  Description of Artificial Sequence: Synthetic polynucleotide
aaacggatccttcgaaacgaaattaatacgactcactatagggaagtttttcgcgtctgatgaggccgttaggccgaaactcctctccggagtcacgcgaaaaaatgcgtacaacaaacttgcataaaccaaaaaaatggggcaaataagaatttgataagtaccacttaaatttaactcccttgcttagcgatggtgagcgagctgattaaggagaacatgcacatgaagctgtacatggagggcaccgtgaacaaccaccacttcaagtgcacatccgagggcgaaggcaagccctacgagggcacccagaccatgagaatcaaggcggtcgagggcggccctctccccttcgccttcgacatcctggctaccagcttcatgtacggcagcaaaaccttcatcaaccacacccagggcatccccgacttctttaagcagtccttccccgagggcttcacatgggagagagtcaccacatacgaagacgggggcgtgctgaccgctacccaggacaccagcctccaggacggctgcctcatctacaacgtcaagatcagaggggtgaacttcccatccaacggccctgtgatgcagaagaaaacactcggctgggaggcctccaccgagaccctgtaccccgctgacggcggcctggaaggcagagccgacatggccctgaagctcgtgggcgggggccacctgatctgcaacttgaagaccacatacagatccaagaaacccgctaagaacctcaagatgcccggcgtctactatgtggacagaagactggaaagaatcaaggaggccgacaaagagacctacgtcgagcagcacgaggtggctgtggccagatactgcgacctccctagcaaactggggcacagatgagtattcaattatagttattaaaaacttaacagaagacaaaaatggggcaaataagaatttgataagtaccacttaaatttaactcccttgcttagcgatgggttcgaattcgctatcgatgataaaagtacgtctacaaaatctatttgataatgatgaagtagcgctactaaaaataacgtgttatacggataaactaatacatctaacgaatgcgctagcgaaagcggtaatacatacgataaaactaaatggtatagtatttgtacatgtaataacgtcgtcggatatatgtccgaataataatatagtagtaaaatcgaattttacgacgatgccggtactacaaaatggtggttatatatgggaaatgatggaactaacgcattgttcgcaaccgaatggtctactagatgataattgtgaaataaaattttcgaaaaaactatcggattcgacgatgacgaattatatgaatcaactatcggaactactaggttttgatctaaatccgtaaattataattaatatcaactagcaaatcaatgtcactaacaccattagttaatataaaacttaacagaagacaaaaatggggcaaataaatcaattcagccaacccaaccatggatacgacgcataatgataatacgccgcaacgtctaatgataacggatatgcgtccgctatcgctagaaacgataataacgtcgctaacgcgtgatataataacgcataaatttatatatctaataaatcatgaatgtatagtacgtaaactagatgaacgtcaagcgacgtttacgtttctagtaaattatgaaatgaaactactacataaagtaggttcgacgaaatataaaaaatatacggaatataatacgaaatatggtacgtttccgatgccgatatttataaatcatgatggttttctagaatgtataggtataaaaccgacgaaacatacgccgataatatataaatatgatctaaatccgtaaatttcaacacaatattcacacaatctaaaacaacaactctatgcataactatactccatagtccagatggagcctgaaaattatagtaatttaaaattaaggagagatataagatagaagatggggcaaatacaaagatggctcttagcaaagtcaagttgaatgatacactcaacaaagatcaacttctgtcatccagcaaatacaccatccaacggagcacaggagatagtattgatactcctaattatgatgtgcagaaacacatcaataagttatgtggcatgttattaatcacagaagatgctaatcataaattcactgggttaataggtatgttatatgcgatgtctaggttaggaagagaagacaccataaaaatactcagagatgcgggatatcatgtaaaagcaaatggagtagatgtaacaacacatcgtcaagacattaatggaaaagaaatgaaatttgaagtgttaacattggcaagcttaacaactgaaattcaaatcaacattgagatagaatctagaaaatcctacaaaaaaatgctaaaagaaatgggagaggtagctccagaatacaggcatgactctcctgattgtgggatgataatattatgtatagcagcattagtaataactaaattagcagcaggggacagatctggtcttacagccgtgattaggagagctaataatgtcctaaaaaatgaaatgaaacgttacaaaggcttactacccaaggacatagccaacagcttctatgaagtgtttgaaaaacatccccactttatagatgtttttgttcattttggtatagcacaatcttctaccagaggtggcagtagagttgaagggatttttgcaggattgtttatgaatgcctatggtgcagggcaagtgatgttacggtggggagtcttagcaaaatcagttaaaaatattatgttaggacatgctagtgtgcaagcagaaatggaacaagttgttgaggtttatgaatatgcccaaaaattgggtggtgaagcaggattctaccatatattgaacaacccaaaagcatcattattatctttgactcaatttcctcacttctccagtgtagtattaggcaatgctgctggcctaggcataatgggagagtacagaggtacaccgaggaatcaagatctatatgatgcagcaaaggcatatgctgaacaactcaaagaaaatggtgtgattaactacagtgtactagacttgacagcagaagaactagaggctatcaaacatcagcttaatccaaaagataatgatgtagagctttgagttaataaaaaatggggcaaataaatcatcatggaaaagtttgctcctgaattccatggagaagatgcaaacaacagggctactaaattcctagaatcaataaagggcaaattcacatcacccaaagatcccaagaaaaaagatagtatcatatctgtcaactcaatagatatagaagtaaccaaagaaagccctataacatcaaattcaactattatcaacccaacaaatgagacagatgatactgcagggaacaagcccaattatcaaagaaaacctctagtaagtttcaaagaagaccctacaccaagtgataatcccttttctaaactatacaaagaaaccatagaaacatttgataacaatgaagaagaatccagctattcatacgaagaaataaatgatcagacaaacgataatataacagcaagattagataggattgatgaaaaattaagtgaaatactaggaatgcttcacacattagtagtggcaagtgcaggacctacatctgctcgggatggtataagagatgccatgattggtttaagagaagaaatgatagaaaaaatcagaactgaagcattaatgaccaatgacagattagaagctatggcaagactcaggaatgaggaaagtgaaaagatggcaaaagacacatcagatgaagtgtctctcaatccaacatcagagaaattgaacaacctattggaagggaatgatagtgacaatgatctatcacttgaagatttctgattagttaccactcttcacatcaacacacaataccaacagaagaccaacaaactaaccaacccaatcatccaaccaaacatccatccgccaatcagccaaacagccaacaaaacaaccagccaatccaaaactaaccacccggaaaaaatctataatatagttacaaaaaaaggaaagggtggggcaaatatggaaacatacgtgaacaagcttcacgaaggctccacatacacagctgctgttcaatacaatgtcttagaaaaagacgatgaccctgcatcacttacaatatgggtgcccatgttccaatcatctatgccagcagatttacttataaaagaactagctaatgtcaacatactagtgaaacaaatatccacacccaagggaccttcactaagagtcatgataaactcaagaagtgcagtgctagcacaaatgcccagcaaatttaccatatgcgctaatgtgtccttggatgaaagaagcaaactagcatatgatgtaaccacaccctgtgaaatcaaggcatgtagtctaacatgcctaaaatcaaaaaatatgttgactacagttaaagatctcactatgaagacactcaaccctacacatgatattattgctttatgtgaatttgaaaacatagtaacatcaaaaaaagtcataataccaacatacctaagatccatcagtgtcagaaataaagatctgaacacacttgaaaatataacaaccactgaattcaaaaatgctatcacaaatgcaaaaatcatcccttactcaggattactattagtcatcacagtgactgacaacaaaggagcattcaaatacataaagccacaaagtcaattcatagtagatcttggagcttacctagaaaaagaaagtatatattatgttaccacaaattggaagcacacagctacacgatttgcaatcaaacccatggaagattaacctttttcctctacatcagtgtgttaattcatacaaactttctacctacattcttcacttcaccatcacaatcacaaacactctgtggttcaaccaatcaaacaaaacttatctgaagtcccagatcatcccaagtcattgtttatcagatctagtactcaaataagttaataaaaaatatacacatggacgtccatggggcaaatgcaaacatgtttgtttttcttgttttattgccactagtctctagtcagtgtgttaatcttacaaccagaactcaattaccccctgcatacactaattctttcacacgtggtgtttattaccctgacaaagttttcagatcctcagttttacattcaactcaggacttgttcttacctttcttttccaatgttacttggttccatgctatacatgtctctgggaccaatggtactaagaggtttgataaccctgtcctaccatttaatgatggtgtttattttgcttccactgagaagtctaacataataagaggctggatttttggtactactttagattcgaagacccagtccctacttattgttaataacgctactaatgttgttattaaagtctgtgaatttcaattttgtaatgatccatttttgggtgtttattaccacaaaaacaacaaaagttggatggaaagtgagttcagagtttattctagtgcgaataattgcacttttgaatatgtctctcagccttttcttatggaccttgaaggaaaacagggtaatttcaaaaatcttagggaatttgtgtttaagaatattgatggttattttaaaatatattctaagcacacgcctattaatttagtgcgtgatctccctcagggtttttcggctttagaaccattggtagatttgccaataggtattaacatcactaggtttcaaactttacttgctttacatagaagttatttgactcctggtgattcttcttcaggttggacagctggtgctgcagcttattatgtgggttatcttcaacctaggacttttctattaaaatataatgaaaatggaaccattacagatgctgtagactgtgcacttgaccctctctcagaaacaaagtgtacgttgaaatccttcactgtagaaaaaggaatctatcaaacttctaactttagagtccaaccaacagaatctattgttagatttcctaatattacaaacttgtgcccttttggtgaagtttttaacgccaccagatttgcatctgtttatgcttggaacaggaagagaatcagcaactgtgttgctgattattctgtcctatataattccgcatcattttccacttttaagtgttatggagtgtctcctactaaattaaatgatctctgctttactaatgtctatgcagattcatttgtaattagaggtgatgaagtcagacaaatcgctccagggcaaactggaaagattgctgattataattataaattaccagatgattttacaggctgcgttatagcttggaattctaacaatcttgattctaaggttggtggtaattataattacctgtatagattgtttaggaagtctaatctcaaaccttttgagagagatatttcaactgaaatctatcaggccggtagcacaccttgtaatggtgttgaaggttttaattgttactttcctttacaatcatatggtttccaacccactaatggtgttggttaccaaccatacagagtagtagtactttcttttgaacttctacatgcaccagcaactgtttgtggacctaaaaagtctactaatttggttaaaaacaaatgtgtcaatttcaacttcaatggtttaacaggcacaggtgttcttactgagtctaacaaaaagtttctgcctttccaacaatttggcagagacattgctgacactactgatgctgtccgtgatccacagacacttgagattcttgacattacaccatgttcttttggtggtgtcagtgttataacaccaggaacaaatacttctaaccaggttgctgttctttatcaggatgttaactgcacagaagtccctgttgctattcatgcagatcaacttactcctacttggcgtgtttattctacaggttctaatgtttttcaaacacgtgcaggctgtttaataggggctgaacatgtcaacaactcatatgagtgtgacatacccattggtgcaggtatatgcgctagttatcagactcagactaattctcctcagcgggcacgtagtgtagctagtcaatccatcattgcctacactatgtcacttggtgcagaaaattcagttgcttactctaataactctattgccatacccacaaattttactattagtgttaccacagaaattctaccagtgtctatgaccaagacatcagtagattgtacaatgtacatttgtggtgattcaactgaatgcagcaatcttttgttgcaatatggcagtttttgtacacaattaaaccgtgctttaactggaatagctgttgaacaagacaaaaacacccaagaagtttttgcacaagtcaaacaaatttacaaaacaccaccaattaaagattttggtggttttaatttttcacaaatattaccagatccatcaaaaccaagcaagaggtcatttattgaagatctacttttcaacaaagtgacacttgcagatgctggcttcatcaaacaatatggtgattgccttggtgatattgctgctagagacctcatttgtgcacaaaagtttaacggccttactgttttgccacctttgctcacagatgaaatgattgctcaatacacttctgcactgttagcgggtacaatcacttctggttggacctttggtgcaggtgctgcattacaaataccatttgctatgcaaatggcttataggtttaatggtattggagttacacagaatgttctctatgagaaccaaaaattgattgccaaccaatttaatagtgctattggcaaaattcaagactcactttcttccacagcaagtgcacttggaaaacttcaagatgtggtcaaccaaaatgcacaagctttaaacacgcttgttaaacaacttagctccaattttggtgcaatttcaagtgttttaaatgatatcctttcacgtcttgacaaagttgaggctgaagtgcaaattgataggttgatcacaggcagacttcaaagtttgcagacatatgtgactcaacaattaattagagctgcagaaatcagagcttctgctaatcttgctgctactaaaatgtcagagtgtgtacttggacaatcaaaaagagttgatttttgtggaaagggctatcatcttatgtccttccctcagtcagcacctcatggtgtagtcttcttgcatgtgacttatgtccctgcacaagaaaagaacttcacaactgctcctgccatttgtcatgatggaaaagcacactttcctcgtgaaggtgtctttgtttcaaatggcacacactggtttgtaacacaaaggaatttttatgaaccacaaatcattactacagacaacacatttgtgtctggtaactgtgatgttgtaataggaattgtcaacaacacagtttatgatcctttgcaacctgaattagactcattcaaggaggagttagataaatattttaagaatcatacatcaccagatgttgatttaggtgacatctctggcattaatgcttcagttgtaaacattcaaaaagaaattgaccgcctcaatgaggttgccaagaatttaaatgaatctctcatcgatctccaagaacttggaaagtatgagcagtatataaaatggccatggtacatttggctaggttttatagctggcttgattgccatagtaatggtgacaattatgctttgctgtatgaccagttgctgtagttgtctcaagggctgttgttcttgtggatcctgctgcaaatttgatgaagacgacggactgctcctatactgtaaggccagaagcacaccaatcacactaagcaaggatcaactgagtggtataaataatattgcatttagtaactaaataaaaatagcacctaatcatgttcttacaatggtttactatctgctcatagacaacccatctatcattggattttcttaaaatctgaacttcatcgaaactcttatctataaaccatctcacttacactatttaagtagattcctagtttatagttatataaaacacaattgaatgccagtcgaccttaccatctgtaaaaatgaaaactggggcaaatatgtcacgaaggaatccttgcaaatttgaaattcgaggtcattgcttaaatggtaagaggtgtcattttagtcataattattttgaatggccaccccatgcactgcttgtaagacaaaactttatgttaaacagaatacttaagtctatggataaaagtatagataccttatcagaaataagtggagctgcagagttggacagaacagaagagtatgctcttggtgtagttggagtgctagagagttatataggatcaataaacaatataactaaacaatcagcatgtgttgccatgagcaaactcctcactgaactcaatagtgatgatatcaaaaagctgagggacaatgaagagctaaattcacccaagataagagtgtacaatactgtcatatcatatattgaaagcaacaggaaaaacaataaacaaactatccatctgttaaaaagattgccagcagacgtattgaagaaaaccatcaaaaacacattggatatccataagagcataaccatcaacaacccaaaagaatcaactgttagtgatacaaatgaccatgccaaaaataatgatactacctgacaaatatccttgtagtataacttccatactaataacaagtagatgtagagttactatgtataatcaaaagaacacactatatttcaatcaaaacaacccaaataaccatatgtactcaccgaatcaaacattcaatgaaatccattggacctctcaagaattgattgacacaattcaaaattttctacaacatctaggtattattgaggatatatatacaatatatatattagtgtcataacactcaattctaacactcaccacatcgttacattattaattcaaacaattcaagttgtgggacaaaatggatcccattattaatggaaattctgctaatgtttatctaaccgatagttatttaaaaggtgttatctctttctcagagtgtaatgctttaggaagttacatattcaatggtccttatctcaaaaatgattataccaacttaattagtagacaaaatccattaatagaacacatgaatctaaagaaactaaatataacacagtccttaatatctaagtatcataaaggtgaaataaaattagaagaacctacttattttcagtcattacttatgacatacaagagtatgacctcgtcagaacagattgctaccactaatttacttaaaaagataataagaagagctatagaaataagtgatgtcaaagtctatgctatattgaataaactagggcttaaagaaaaggacaagattaaatccaacaatggacaagatgaagacaactcagttattacgaccataatcaaagatgatatactttcagctgttaaagataatcaatctcatcttaaagcagacaaaaatcactctacaaaacaaaaagacacaatcaaaacaacactcttgaagaaattgatgtgttcaatgcaacatcctccatcatggttaatacattggtttaacttatacacaaaattaaacaacatattaacacagtatcgatcaaatgaggtaaaaaaccatgggtttacattgatagataatcaaactcttagtggatttcaatttattttgaaccaatatggttgtatagtttatcataaggaactcaaaagaattactgtgacaacctataatcaattcttgacatggaaagatattagccttagtagattaaatgtttgtttaattacatggattagtaactgcttgaacacattaaataaaagcttaggcttaagatgcggattcaataatgttatcttgacacaactattcctttatggagattgtatactaaagctatttcacaatgaggggttctacataataaaagaggtagagggatttattatgtctctaattttaaatataacagaagaagatcaattcagaaaacgattttataatagtatgctcaacaacatcacagatgctgctaataaagctcagaaaaatctgctatcaagagtatgtcatacattattagataagacagtgtccgataatataataaatggcagatggataattctattaagtaagttccttaaattaattaagcttgcaggtgacaataaccttaacaatctgagtgaactatattttttgttcagaatatttggacacccaatggtagatgaaagacaagccatggatgctgttaaaattaattgcaatgagaccaaattttacttgttaagcagtctgagtatgttaagaggtgcctttatatatagaattataaaagggtttgtaaataattacaacagatggcctactttaagaaatgctattgttttacccttaagatggttaacttactataaactaaacacttatccttctttgttggaacttacagaaagagatttgattgtgttatcaggactacgtttctatcgtgagtttcggttgcctaaaaaagtggatcttgaaatgattataaatgataaagctatatcacctcctaaaaatttgatatggactagtttccctagaaattacatgccatcacacatacaaaactatatagaacatgaaaaattaaaattttccgagagtgataaatcaagaagagtattagagtattatttaagagataacaaattcaatgaatgtgatttatacaactgtgtagttaatcaaagttatctcaacaaccctaatcatgtggtatcattgacaggcaaagaaagagaactcagtgtaggtagaatgtttgcaatgcaaccgggaatgttcagacaggttcaaatattggcagagaaaatgatagctgaaaacattttacaattctttcctgaaagtcttacaagatatggtgatctagaactacaaaaaatattagaattgaaagcaggaataagtaacaaatcaaatcgctacaatgataattacaacaattacattagtaagtgctctatcatcacagatctcagcaaattcaatcaagcatttcgatatgaaacgtcatgtatttgtagtgatgtgctggatgaactgcatggtgtacaatctctattttcctggttacatttaactattcctcatgtcacaataatatgcacatataggcatgcacccccctatataggagatcatattgtagatcttaacaatgtagatgaacaaagtggattatatagatatcacatgggtggcatcgaagggtggtgtcaaaaactgtggaccatagaagctatatcactattggatctaatatctctcaaagggaaattctcaattactgctttaattaatggtgacaatcaatcaatagatataagcaaaccaatcagactcatggaaggtcaaactcatgctcaagcagattatttgctagcattaaatagccttaaattactgtataaagagtatgcaggcataggccacaaattaaaaggaactgagacttatatatcacgagatatgcaatttatgagtaaaacaattcaacataacggtgtatattacccagctagtataaagaaagtcctaagagtgggaccgtggataaacactatacttgatgatttcaaagtgagtctagaatctataggtagtttgacacaagaattagaatatagaggtgaaagtctattatgcagtttaatatttagaaatgtatggttatataatcagattgctctacaattaaaaaatcatgcattatgtaacaataaactatatttggacatattaaaggttctgaaacacttaaaaaccttttttaatcttgataatattgatacagcattaacattgtatatgaatttacccatgttatttggtggtggtgatcccaacttgttatatcgaagtttctatagaagaactcctgacttcctcacagaggctatagttcactctgtgttcatacttagttattatacaaaccatgacttaaaagataaacttcaagatctgtcagatgatagattgaataagttcttaacatgcataatcacgtttgacaaaaaccctaatgctgaattcgtaacattgatgagagatcctcaagctttagggtctgagagacaagctaaaattactagcgaaatcaatagactggcagttacagaggttttgagtacagctccaaacaaaatattctccaaaagtgcacaacattatactactacagagatagatctaaatgatattatgcaaaatatagaacctacatatcctcatgggctaagagttgtttatgaaagtttacccttttataaagcagagaaaatagtaaatcttatatcaggtacaaaatctataactaacatactggaaaaaacttctgccatagacttaacagatattgatagagccactgagatgatgaggaaaaacataactttgcttataaggatacttccattggattgtaacagagataaaagagagatattgagtatggaaaacctaagtattactgaattaagcaaatatgttagggaaagatcttggtctttatccaatatagttggtgttacatcacccagtatcatgtatacaatggacatcaaatatactacaagcactatatctagtggcataattatagagaaatataatgttaacagtttaacacgtggtgagagaggacccactaaaccatgggttggttcatctacacaagagaaaaaaacaatgccagtttataatagacaagtcttaaccaaaaaacagagagatcaaatagatctattagcaaaattggattgggtgtatgcatctatagataacaaggatgaattcatggaagaactcagcataggaacccttgggttaacatatgaaaaggccaagaaattatttccacaatatttaagtgtcaattatttgcatcgccttacagtcagtagtagaccatgtgaattccctgcatcaataccagcttatagaacaacaaattatcactttgacactagccctattaatcgcatattaacagaaaagtatggtgatgaagatattgacatagtattccaaaactgtataagctttggccttagtttaatgtcagtagtagaacaatttactaatgtatgtcctaacagaattattctcatacctaagcttaatgagatacatttgatgaaacctcccatattcacaggtgatgttgatattcacaagttaaaacaagtgatacaaaaacagcatatgtttttaccagacaaaataagtttgactcaatatgtggaattattcttaagtaataaaacactcaaatctggatctcatgttaattctaatttaatattggcacataaaatatctgactattttcataatacttacattttaagtactaatttagctggacattggattctgattatacaacttatgaaagattctaaaggtatttttgaaaaagattggggagagggatatataactgatcatatgtttattaatttgaaagttttcttcaatgcttataagacctatctcttgtgttttcataaaggttatggcaaagcaaagctggagtgtgatatgaacacttcagatcttctatgtgtattggaattaatagacagtagttattggaagtctatgtctaaggtatttttagaacaaaaagttatcaaatacattcttagccaagatgcaagtttacatagagtaaaaggatgtcatagcttcaaattatggtttcttaaacgtcttaatgtagcagaattcacagtttgcccttgggttgttaacatagattatcatccaacacatatgaaagcaatattaacttatatagatcttgttagaatgggattgataaatatagatagaatacacattaaaaataaacacaaattcaatgatgaattttatacttctaatctcttctacattaattataacttctcagataatactcatctattaactaaacatataaggattgctaattctgaattagaaaataattacaacaaattatatcatcctacaccagaaaccctagagaatatactagccaatccgattaaaagtaatgacaaaaagacactgaatgactattgtataggtaaaaatgttgactcaataatgttaccattgttatctaataagaagcttattaaatcgtctgcaatgattagaaccaattacagcaaacaagatttgtataatttattccctatggttgtgattgatagaattatagatcattcaggcaatacagccaaatccaaccaactttacactactacttcccaccaaatatctttagtgcacaatagcacatcactttactgcatgcttccttggcatcatattaatagattcaattttgtatttagttctacaggttgtaaaattagtatagagtatattttaaaagatcttaaaattaaagatcccaattgtatagcattcataggtgaaggagcagggaatttattattgcgtacagtagtggaacttcatcctgacataagatatatttacagaagtctgaaagattgcaatgatcatagtttacctattgagtttttaaggctgtacaatggacatatcaacattgattatggtgaaaatttgaccattcctgctacagatgcaaccaacaacattcattggtcttatttacatataaagtttgctgaacctatcagtctttttgtctgtgatgccgaattgtctgtaacagtcaactggagtaaaattataatagaatggagcaagcatgtaagaaagtgcaagtactgttcctcagttaataaatgtatgttaatagtaaaatatcatgctcaagatgatattgatttcaaattagacaatataactatattaaaaacttatgtatgcttaggcagtaagttaaagggatcggaggtttacttagtccttacaataggtcctgcgaatatattcccagtatttaatgtagtacaaaatgctaaattgatactatcaagaaccaaaaatttcatcatgcctaagaaagctgataaagagtctattgatgcaaatattaaaagtttgataccctttctttgttaccctataacaaaaaaaggaattaatactgcattgtcaaaactaaagagtgttgttagtggagatatactatcatattctatagctggacgtaatgaagttttcagcaataaacttataaatcataagcatatgaacatcttaaaatggttcaatcatgttttaaatttcagatcaacagaactaaactataaccatttatatatggtagaatctacatatccttacctaagtgaattgttaaacagcttgacaaccaatgaacttaaaaaactgattaaaatcacaggtagtctgttatacaactttcataatgaataatgaataaagatcttataataaaaattcccatagctatacactaacactgtattcaattatagttattaaaaattaaaaatcgtacgattttttaaataacttttagtgaactaatcctaaagttatcattttaatcttggaggaataaatttaaaccctaatctaattggtttatatgtgtattaactaaattacgagatattagtttttgacactttttttctcgtgggtcggcatggcatctccacctcctcgcggtccgacctgggcatccgaaggaggacgcacgtccactcggatggctaagggagctgctaacaaagcccgaaaggaagctgagttggctgctgccaccgctgagcaataactagcataaccccttggggcctctaaacgggtcttgaggggttttttgctgaaaggaggaactatatacgcgtaagcttctcgacccattctcatgtttgacagcttatcatcgaatttctgccattcatccgcttattatcacttattcaggcgtagcaaccaggcgtttaagggcaccaataactgccttaaaaaaattacgccccgccctgccactcatcgcagtactgttgtaattcattaagcattctgccgacatggaagccatcacagacggcatgatgaacctgaatcgccagcggcatcagcaccttgtcgccttgcgtataatatttgcccatggtgaaaacgggggcgaagaagttgtccatattggccacgtttaaatcaaaactggtgaaactcacccagggattggctgagacgaaaaacatattctcaataaaccctttagggaaataggccaggttttcaccgtaacacgccacatcttgcgaatatatgtgtagaaactgccggaaatcgtcgtggtattcactccagagcgatgaaaacgtttcagtttgctcatggaaaacggtgtaacaagggtgaacactatcccatatcaccagctcaccgtctttcattgccatacggaattccggatgagcattcatcaggcgggcaagaatgtgaataaaggccggataaaacttgtgcttatttttctttacggtctttaaaaaggccgtaatatccagctgaacggtctggttataggtacattgagcaactgactgaaatgcctcaaaatgttctttacgatgccattgggatatatcaacggtggtatatccagtgatttttttctccattttagcttccttagctcctgaaaatctcgataactcaaaaaatacgcccggtagtgatcttatttcattatggtgaaagttggaacctcttacgtgccgatcaacgtctcattttcgccaaaagttggcccagggcttcccggtatcaacagggacaccaggatttatttattctgcgaagtgatcttccgtcacaggtatttattcgcgataagctcatggagcggcgtaaccgtcgcacaggaaggacagagaaagcgcggatctgggaagtgacggacagaacggtcaggacctggattggggaggcggttgccgccgctgctgctgacggtgtgacgttctctgttccggtcacaccacatacgttccgccattcctatgcgatgcacatgctgtatgccggtataccgctgaaagttctgcaaagcctgatgggacataagtccatcagttcaacggaagtctacacgaaggtttttgcgctggatgtggctgcccggcaccgggtgcagtttgcgatgccggagtctgatgcggttgcgatgctgaaacaattatcctgagaataaatgccttggcctttatatggaaatgtggaactgagtggatatgctgtttttgtctgttaaacagagaagctggctgttatccactgagaagcgaacgaaacagtcgggaaaatctcccattatcgtagagatccgcattattaatctcaggagcctgtgtagcgtttataggaagtagtgttctgtcatgatgcctgcaagcggtaacgaaaacgatttgaatatgccttcaggaacaatagaaatcttcgtgcggtgttacgttgaagtggagcggattatgtcagcaatggacagaacaacctaatgaacacagaaccatgatgtggtctgtccttttacagccagtaggctcgccgcagtcgagcgacggcgaagccctcgagtgagcgaggaagcaccagggaacagcacttatatattctgcttacacacgatgcctgaaaaaacttcccttggggttatccacttatccacggggatatttttataattattttttttatagtttttagatcttcttttttagagcgccttgtaggcctttatccatgctggttctagagaaggtgttgtgacaaattgccctttcagtgtgacaaatcaccctcaaatgacagtcctgtctgtgacaaattgcccttaaccctgtgacaaattgccctcagaagaagctgttttttcacaaagttatccctgcttattgactcttttttatttagtgtgacaatctaaaaacttgtcacacttcacatggatctgtcatggcggaaacagcggttatcaatcacaagaaacgtaaaaatagcccgcgaatcgtccagtcaaacgacctcactgaggcggcatatagtctctcccgggatcaaaaacgtatgctgtatctgttcgttgaccagatcagaaaatctgatggcaccctacaggaacatgacggtatctgcgagatccatgttgctaaatatgctgaaatattcggattgacctctgcggaagccagtaaggatatacggcaggcattgaagagtttcgcggggaaggaagtggttttttatcgccctgaagaggatgccggcgatgaaaaaggctatgaatcttttccttggtttatcaaacgtgcgcacagtccatccagagggctttacagtgtacatatcaacccatatctcattcccttctttatcgggttacagaaccggtttacgcagtttcggcttagtgaaacaaaagaaatcaccaatccgtatgccatgcgtttatacgaatccctgtgtcagtatcgtaagccggatggctcaggcatcgtctctctgaaaatcgactggatcatagagcgttaccagctgcctcaaagttaccagcgtatgcctgacttccgccgccgcttcctgcaggtctgtgttaatgagatcaacagcagaactccaatgcgcctctcatacattgagaaaaagaaaggccgccagacgactcatatcgtattttccttccgcgatatcacttccatgacgacaggatagtctgagggttatctgtcacagatttgagggtggttcgtcacatttgttctgacctactgagggtaatttgtcacagttttgctgtttccttcagcctgcatggattttctcatactttttgaactgtaatttttaaggaagccaaatttgagggcagtttgtcacagttgatttccttctctttcccttcgtcatgtgacctgatatcgggggttagttcgtcatcattgatgagggttgattatcacagtttattactctgaattggctatccgcgtgtgtacctctacctggagtttttcccacggtggatatttcttcttgcgctgagcgtaagagctatctgacagaacagttcttctttgcttcctcgccagttcgctcgctatgctcggttacacggctgcggcgagcgctagtgataataagtgactgaggtatgtgctcttcttatctccttttgtagtgttgctcttattttaaacaactttgcggttttttgatgactttgcgattttgttgttgctttgcagtaaattgcaagatttaataaaaaaacgcaaagcaatgattaaaggatgttcagaatgaaactcatggaaacacttaaccagtgcataaacgctggtcatgaaatgacgaaggctatcgccattgcacagtttaatgatgacagcccggaagcgaggaaaataacccggcgctggagaataggtgaagcagcggatttagttggggtttcttctcaggctatcagagatgccgagaaagcagggcgactaccgcacccggatatggaaattcgaggacgggttgagcaacgtgttggttatacaattgaacaaattaatcatatgcgtgatgtgtttggtacgcgattgcgacgtgctgaagacgtatttccaccggtgatcggggttgctgcccataaaggtggcgtttacaaaacctcagtttctgttcatcttgctcaggatctggctctgaaggggctacgtgttttgctcgtggaaggtaacgacccccagggaacagcctcaatgtatcacggatgggtaccagatcttcatattcatgcagaagacactctcctgcctttctatcttggggaaaaggacgatgtcacttatgcaataaagcccacttgctggccggggcttgacattattccttcctgtctggctctgcaccgtattgaaactgagttaatgggcaaatttgatgaaggtaaactgcccaccgatccacacctgatgctccgactggccattgaaactgttgctcatgactatgatgtcatagttattgacagcgcgcctaacctgggtatcggcacgattaatgtcgtatgtgctgctgatgtgctgattgttcccacgcctgctgagttgtttgactacacctccgcactgcagtttttcgatatgcttcgtgatctgctcaagaacgttgatcttaaagggttcgagcctgatgtacgtattttgcttaccaaatacagcaatagtaatggctctcagtccccgtggatggaggagcaaattcgggatgcctggggaagcatggttctaaaaaatgttgtacgtgaaacggatgaagttggtaaaggtcagatccggatgagaactgtttttgaacaggccattgatcaacgctcttcaactggtgcctggagaaatgctctttctatttgggaacctgtctgcaatgaaattttcgatcgtctgattaaaccacgctgggagattagataatgaagcgtgcgcctgttattccaaaacatacgctcaatactcaaccggttgaagatacttcgttatcgacaccagctgccccgatggtggattcgttaattgcgcgcgtaggagtaatggctcgcggtaatgccattactttgcctgtatgtggtcgggatgtgaagtttactcttgaagtgctccggggtgatagtgttgagaagacctctcgggtatggtcaggtaatgaacgtgaccaggagctgcttactgaggacgcactggatgatctcatcccttcttttctactgactggtcaacagacaccggcgttcggtcgaagagtatctggtgtcatagaaattgccgatgggagtcgccgtcgtaaagctgctgcacttaccgaaagtgattatcgtgttctggttggcgagctggatgatgagcagatggctgcattatccagattgggtaacgattatcgcccaacaagtgcttatgaacgtggtcagcgttatgcaagccgattgcagaatgaatttgctggaaatatttctgcgctggctgatgcggaaaatatttcacgtaagattattacccgctgtatcaacaccgccaaattgcctaaatcagttgttgctcttttttctcaccccggtgaactatctgcccggtcaggtgatgcacttcaaaaagcctttacagataaagaggaattacttaagcagcaggcatctaaccttcatgagcagaaaaaagctggggtgatatttgaagctgaagaagttatcactcttttaacttctgtgcttaaaacgtcatctgcatcaagaactagtttaagctcacgacatcagtttgctcctggagcgacagtattgtataagggcgataaaatggtgcttaacctggacaggtctcgtgttccaactgagtgtatagagaaaattgaggccattcttaaggaacttgaaaagccagcaccctgatgcgaccacgttttagtctacgtttatctgtctttacttaatgtcctttgttacaggccagaaagcataactggcctgaatattctctctgggcccactgttccacttgtatcgtcggtctgataatcagactgggaccacggtcccactcgtatcgtcggtctgattattagtctgggaccacggtcccactcgtatcgtcggtctgattattagtctgggaccacggtcccactcgtatcgtcggtctgataatcagactgggaccacggtcccactcgtatcgtcggtctgattattagtctgggaccatggtcccactcgtatcgtcggtctgattattagtctgggaccacggtcccactcgtatcgtcggtctgattattagtctggaaccacggtcccactcgtatcgtcggtctgattattagtctgggaccacggtcccactcgtatcgtcggtctgattattagtctgggaccacgatcccactcgtgttgtcggtctgattatcggtctgggaccacggtcccacttgtattgtcgatcagactatcagcgtgagactacgattccatcaatgcctgtcaagggcaagtattgacatgtcgtcgtaacctgtagaacggagtaacctcggtgtgcggttgtatgcctgctgtggattgctgctgtgtcctgcttatccacaacattttgcgcacggttatgtggacaaaatacctggttacccaggccgtgccggcacgttaaccgggctgcatccgatgcaagtgtgtcgctgtcgagttt

SEQ ID NO: 97 - DNA, 22656 bp, Artificial Sequence
  Description of Artificial Sequence: Synthetic polynucleotide
aaacggatccttcgaaacgaaattaatacgactcactatagggaagtttttcgcgtctgatgaggccgttaggccgaaactcctctccggagtcacgcgaaaaaatgcgtacaacaaacttgcataaaccaaaaaaatggggcaaataagaatttgataagtaccacttaaatttaactcccttgcttagcgatgggttcgaattcgctatcgatgataaaagtacgtctacaaaatctatttgataatgatgaagtagcgctactaaaaataacgtgttatacggataaactaatacatctaacgaatgcgctagcgaaagcggtaatacatacgataaaactaaatggtatagtatttgtacatgtaataacgtcgtcggatatatgtccgaataataatatagtagtaaaatcgaattttacgacgatgccggtactacaaaatggtggttatatatgggaaatgatggaactaacgcattgttcgcaaccgaatggtctactagatgataattgtgaaataaaattttcgaaaaaactatcggattcgacgatgacgaattatatgaatcaactatcggaactactaggttttgatctaaatccgtaaattataattaatatcaactagcaaatcaatgtcactaacaccattagttaatataaaacttaacagaagacaaaaatggggcaaataaatcaattcagccaacccaaccatggatacgacgcataatgataatacgccgcaacgtctaatgataacggatatgcgtccgctatcgctagaaacgataataacgtcgctaacgcgtgatataataacgcataaatttatatatctaataaatcatgaatgtatagtacgtaaactagatgaacgtcaagcgacgtttacgtttctagtaaattatgaaatgaaactactacataaagtaggttcgacgaaatataaaaaatatacggaatataatacgaaatatggtacgtttccgatgccgatatttataaatcatgatggttttctagaatgtataggtataaaaccgacgaaacatacgccgataatatataaatatgatctaaatccgtaaatttcaacacaatattcacacaatctaaaacaacaactctatgcataactatactccatagtccagatggagcctgaaaattatagtaatttaaaattaaggagagatataagatagaagatggggcaaatacaaagatggctcttagcaaagtcaagttgaatgatacactcaacaaagatcaacttctgtcatccagcaaatacaccatccaacggagcacaggagatagtattgatactcctaattatgatgtgcagaaacacatcaataagttatgtggcatgttattaatcacagaagatgctaatcataaattcactgggttaataggtatgttatatgcgatgtctaggttaggaagagaagacaccataaaaatactcagagatgcgggatatcatgtaaaagcaaatggagtagatgtaacaacacatcgtcaagacattaatggaaaagaaatgaaatttgaagtgttaacattggcaagcttaacaactgaaattcaaatcaacattgagatagaatctagaaaatcctacaaaaaaatgctaaaagaaatgggagaggtagctccagaatacaggcatgactctcctgattgtgggatgataatattatgtatagcagcattagtaataactaaattagcagcaggggacagatctggtcttacagccgtgattaggagagctaataatgtcctaaaaaatgaaatgaaacgttacaaaggcttactacccaaggacatagccaacagcttctatgaagtgtttgaaaaacatccccactttatagatgtttttgttcattttggtatagcacaatcttctaccagaggtggcagtagagttgaagggatttttgcaggattgtttatgaatgcctatggtgcagggcaagtgatgttacggtggggagtcttagcaaaatcagttaaaaatattatgttaggacatgctagtgtgcaagcagaaatggaacaagttgttgaggtttatgaatatgcccaaaaattgggtggtgaagcaggattctaccatatattgaacaacccaaaagcatcattattatctttgactcaatttcctcacttctccagtgtagtattaggcaatgctgctggcctaggcataatgggagagtacagaggtacaccgaggaatcaagatctatatgatgcagcaaaggcatatgctgaacaactcaaagaaaatggtgtgattaactacagtgtactagacttgacagcagaagaactagaggctatcaaacatcagcttaatccaaaagataatgatgtagagctttgagttaataaaaaatggggcaaataaatcatcatggaaaagtttgctcctgaattccatggagaagatgcaaacaacagggctactaaattcctagaatcaataaagggcaaattcacatcacccaaagatcccaagaaaaaagatagtatcatatctgtcaactcaatagatatagaagtaaccaaagaaagccctataacatcaaattcaactattatcaacccaacaaatgagacagatgatactgcagggaacaagcccaattatcaaagaaaacctctagtaagtttcaaagaagaccctacaccaagtgataatcccttttctaaactatacaaagaaaccatagaaacatttgataacaatgaagaagaatccagctattcatacgaagaaataaatgatcagacaaacgataatataacagcaagattagataggattgatgaaaaattaagtgaaatactaggaatgcttcacacattagtagtggcaagtgcaggacctacatctgctcgggatggtataagagatgccatgattggtttaagagaagaaatgatagaaaaaatcagaactgaagcattaatgaccaatgacagattagaagctatggcaagactcaggaatgaggaaagtgaaaagatggcaaaagacacatcagatgaagtgtctctcaatccaacatcagagaaattgaacaacctattggaagggaatgatagtgacaatgatctatcacttgaagatttctgattagttaccactcttcacatcaacacacaataccaacagaagaccaacaaactaaccaacccaatcatccaaccaaacatccatccgccaatcagccaaacagccaacaaaacaaccagccaatccaaaactaaccacccggaaaaaatctataatatagttacaaaaaaaggaaagggtggggcaaatatggaaacatacgtgaacaagcttcacgaaggctccacatacacagctgctgttcaatacaatgtcttagaaaaagacgatgaccctgcatcacttacaatatgggtgcccatgttccaatcatctatgccagcagatttacttataaaagaactagctaatgtcaacatactagtgaaacaaatatccacacccaagggaccttcactaagagtcatgataaactcaagaagtgcagtgctagcacaaatgcccagcaaatttaccatatgcgctaatgtgtccttggatgaaagaagcaaactagcatatgatgtaaccacaccctgtgaaatcaaggcatgtagtctaacatgcctaaaatcaaaaaatatgttgactacagttaaagatctcactatgaagacactcaaccctacacatgatattattgctttatgtgaatttgaaaacatagtaacatcaaaaaaagtcataataccaacatacctaagatccatcagtgtcagaaataaagatctgaacacacttgaaaatataacaaccactgaattcaaaaatgctatcacaaatgcaaaaatcatcccttactcaggattactattagtcatcacagtgactgacaacaaaggagcattcaaatacataaagccacaaagtcaattcatagtagatcttggagcttacctagaaaaagaaagtatatattatgttaccacaaattggaagcacacagctacacgatttgcaatcaaacccatggaagattaacctttttcctctacatcagtgtgttaattcatacaaactttctacctacattcttcacttcaccatcacaatcacaaacactctgtggttcaaccaatcaaacaaaacttatctgaagtcccagatcatcccaagtcattgtttatcagatctagtactcaaataagttaataaaaaatatacacatggacgtccatggggcaaatgcaaacatgtttgtttttcttgttttattgccactagtctctagtcagtgtgttaatcttacaaccagaactcaattaccccctgcatacactaattctttcacacgtggtgtttattaccctgacaaagttttcagatcctcagttttacattcaactcaggacttgttcttacctttcttttccaatgttacttggttccatgctatacatgtctctgggaccaatggtactaagaggtttgataaccctgtcctaccatttaatgatggtgtttattttgcttccactgagaagtctaacataataagaggctggatttttggtactactttagattcgaagacccagtccctacttattgttaataacgctactaatgttgttattaaagtctgtgaatttcaattttgtaatgatccatttttgggtgtttattaccacaaaaacaacaaaagttggatggaaagtgagttcagagtttattctagtgcgaataattgcacttttgaatatgtctctcagccttttcttatggaccttgaaggaaaacagggtaatttcaaaaatcttagggaatttgtgtttaagaatattgatggttattttaaaatatattctaagcacacgcctattaatttagtgcgtgatctccctcagggtttttcggctttagaaccattggtagatttgccaataggtattaacatcactaggtttcaaactttacttgctttacatagaagttatttgactcctggtgattcttcttcaggttggacagctggtgctgcagcttattatgtgggttatcttcaacctaggacttttctattaaaatataatgaaaatggaaccattacagatgctgtagactgtgcacttgaccctctctcagaaacaaagtgtacgttgaaatccttcactgtagaaaaaggaatctatcaaacttctaactttagagtccaaccaacagaatctattgttagatttcctaatattacaaacttgtgcccttttggtgaagtttttaacgccaccagatttgcatctgtttatgcttggaacaggaagagaatcagcaactgtgttgctgattattctgtcctatataattccgcatcattttccacttttaagtgttatggagtgtctcctactaaattaaatgatctctgctttactaatgtctatgcagattcatttgtaattagaggtgatgaagtcagacaaatcgctccagggcaaactggaaagattgctgattataattataaattaccagatgattttacaggctgcgttatagcttggaattctaacaatcttgattctaaggttggtggtaattataattacctgtatagattgtttaggaagtctaatctcaaaccttttgagagagatatttcaactgaaatctatcaggccggtagcacaccttgtaatggtgttgaaggttttaattgttactttcctttacaatcatatggtttccaacccactaatggtgttggttaccaaccatacagagtagtagtactttcttttgaacttctacatgcaccagcaactgtttgtggacctaaaaagtctactaatttggttaaaaacaaatgtgtcaatttcaacttcaatggtttaacaggcacaggtgttcttactgagtctaacaaaaagtttctgcctttccaacaatttggcagagacattgctgacactactgatgctgtccgtgatccacagacacttgagattcttgacattacaccatgttcttttggtggtgtcagtgttataacaccaggaacaaatacttctaaccaggttgctgttctttatcaggatgttaactgcacagaagtccctgttgctattcatgcagatcaacttactcctacttggcgtgtttattctacaggttctaatgtttttcaaacacgtgcaggctgtttaataggggctgaacatgtcaacaactcatatgagtgtgacatacccattggtgcaggtatatgcgctagttatcagactcagactaattctcctcagcgggcacgtagtgtagctagtcaatccatcattgcctacactatgtcacttggtgcagaaaattcagttgcttactctaataactctattgccatacccacaaattttactattagtgttaccacagaaattctaccagtgtctatgaccaagacatcagtagattgtacaatgtacatttgtggtgattcaactgaatgcagcaatcttttgttgcaatatggcagtttttgtacacaattaaaccgtgctttaactggaatagctgttgaacaagacaaaaacacccaagaagtttttgcacaagtcaaacaaatttacaaaacaccaccaattaaagattttggtggttttaatttttcacaaatattaccagatccatcaaaaccaagcaagaggtcatttattgaagatctacttttcaacaaagtgacacttgcagatgctggcttcatcaaacaatatggtgattgccttggtgatattgctgctagagacctcatttgtgcacaaaagtttaacggccttactgttttgccacctttgctcacagatgaaatgattgctcaatacacttctgcactgttagcgggtacaatcacttctggttggacctttggtgcaggtgctgcattacaaataccatttgctatgcaaatggcttataggtttaatggtattggagttacacagaatgttctctatgagaaccaaaaattgattgccaaccaatttaatagtgctattggcaaaattcaagactcactttcttccacagcaagtgcacttggaaaacttcaagatgtggtcaaccaaaatgcacaagctttaaacacgcttgttaaacaacttagctccaattttggtgcaatttcaagtgttttaaatgatatcctttcacgtcttgacaaagttgaggctgaagtgcaaattgataggttgatcacaggcagacttcaaagtttgcagacatatgtgactcaacaattaattagagctgcagaaatcagagcttctgctaatcttgctgctactaaaatgtcagagtgtgtacttggacaatcaaaaagagttgatttttgtggaaagggctatcatcttatgtccttccctcagtcagcacctcatggtgtagtcttcttgcatgtgacttatgtccctgcacaagaaaagaacttcacaactgctcctgccatttgtcatgatggaaaagcacactttcctcgtgaaggtgtctttgtttcaaatggcacacactggtttgtaacacaaaggaatttttatgaaccacaaatcattactacagacaacacatttgtgtctggtaactgtgatgttgtaataggaattgtcaacaacacagtttatgatcctttgcaacctgaattagactcattcaaggaggagttagataaatattttaagaatcatacatcaccagatgttgatttaggtgacatctctggcattaatgcttcagttgtaaacattcaaaaagaaattgaccgcctcaatgaggttgccaagaatttaaatgaatctctcatcgatctccaagaacttggaaagtatgagcagtatataaaatggccatggtacatttggctaggttttatagctggcttgattgccatagtaatggtgacaattatgctttgctgtatgaccagttgctgtagttgtctcaagggctgttgttcttgtggatcctgctgcaaatttgatgaagacgacggactgctcctatactgtaaggccagaagcacaccaatcacactaagcaaggatcaactgagtggtataaataatattgcatttagtaactaaataaaaatagcacctaatcatgttcttacaatggtttactatctgctcatagacaacccatctatcattggattttcttaaaatctgaacttcatcgaaactcttatctataaaccatctcacttacactatttaagtagattcctagtttatagttatataaaacacaattgaatgccagtcgaccttaccatctgtaaaaatgaaaactggggcaaatatgtcacgaaggaatccttgcaaatttgaaattcgaggtcattgcttaaatggtaagaggtgtcattttagtcataattattttgaatggccaccccatgcactgcttgtaagacaaaactttatgttaaacagaatacttaagtctatggataaaagtatagataccttatcagaaataagtggagctgcagagttggacagaacagaagagtatgctcttggtgtagttggagtgctagagagttatataggatcaataaacaatataactaaacaatcagcatgtgttgccatgagcaaactcctcactgaactcaatagtgatgatatcaaaaagctgagggacaatgaagagctaaattcacccaagataagagtgtacaatactgtcatatcatatattgaaagcaacaggaaaaacaataaacaaactatccatctgttaaaaagattgccagcagacgtattgaagaaaaccatcaaaaacacattggatatccataagagcataaccatcaacaacccaaaagaatcaactgttagtgatacaaatgaccatgccaaaaataatgatactacctgacaaatatccttgtagtataacttccatactaataacaagtagatgtagagttactatgtataatcaaaagaacacactatatttcaatcaaaacaacccaaataaccatatgtactcaccgaatcaaacattcaatgaaatccattggacctctcaagaattgattgacacaattcaaaattttctacaacatctaggtattattgaggatatatatacaatatatatattagtgtcataacactcaattctaacactcaccacatcgttacattattaattcaaacaattcaagttgtgggacaaaatggatcccattattaatggaaattctgctaatgtttatctaaccgatagttatttaaaaggtgttatctctttctcagagtgtaatgctttaggaagttacatattcaatggtccttatctcaaaaatgattataccaacttaattagtagacaaaatccattaatagaacacatgaatctaaagaaactaaatataacacagtccttaatatctaagtatcataaaggtgaaataaaattagaagaacctacttattttcagtcattacttatgacatacaagagtatgacctcgtcagaacagattgctaccactaatttacttaaaaagataataagaagagctatagaaataagtgatgtcaaagtctatgctatattgaataaactagggcttaaagaaaaggacaagattaaatccaacaatggacaagatgaagacaactcagttattacgaccataatcaaagatgatatactttcagctgttaaagataatcaatctcatcttaaagcagacaaaaatcactctacaaaacaaaaagacacaatcaaaacaacactcttgaagaaattgatgtgttcaatgcaacatcctccatcatggttaatacattggtttaacttatacacaaaattaaacaacatattaacacagtatcgatcaaatgaggtaaaaaaccatgggtttacattgatagataatcaaactcttagtggatttcaatttattttgaaccaatatggttgtatagtttatcataaggaactcaaaagaattactgtgacaacctataatcaattcttgacatggaaagatattagccttagtagattaaatgtttgtttaattacatggattagtaactgcttgaacacattaaataaaagcttaggcttaagatgcggattcaataatgttatcttgacacaactattcctttatggagattgtatactaaagctatttcacaatgaggggttctacataataaaagaggtagagggatttattatgtctctaattttaaatataacagaagaagatcaattcagaaaacgattttataatagtatgctcaacaacatcacagatgctgctaataaagctcagaaaaatctgctatcaagagtatgtcatacattattagataagacagtgtccgataatataataaatggcagatggataattctattaagtaagttccttaaattaattaagcttgcaggtgacaataaccttaacaatctgagtgaactatattttttgttcagaatatttggacacccaatggtagatgaaagacaagccatggatgctgttaaaattaattgcaatgagaccaaattttacttgttaagcagtctgagtatgttaagaggtgcctttatatatagaattataaaagggtttgtaaataattacaacagatggcctactttaagaaatgctattgttttacccttaagatggttaacttactataaactaaacacttatccttctttgttggaacttacagaaagagatttgattgtgttatcaggactacgtttctatcgtgagtttcggttgcctaaaaaagtggatcttgaaatgattataaatgataaagctatatcacctcctaaaaatttgatatggactagtttccctagaaattacatgccatcacacatacaaaactatatagaacatgaaaaattaaaattttccgagagtgataaatcaagaagagtattagagtattatttaagagataacaaattcaatgaatgtgatttatacaactgtgtagttaatcaaagttatctcaacaaccctaatcatgtggtatcattgacaggcaaagaaagagaactcagtgtaggtagaatgtttgcaatgcaaccgggaatgttcagacaggttcaaatattggcagagaaaatgatagctgaaaacattttacaattctttcctgaaagtcttacaagatatggtgatctagaactacaaaaaatattagaattgaaagcaggaataagtaacaaatcaaatcgctacaatgataattacaacaattacattagtaagtgctctatcatcacagatctcagcaaattcaatcaagcatttcgatatgaaacgtcatgtatttgtagtgatgtgctggatgaactgcatggtgtacaatctctattttcctggttacatttaactattcctcatgtcacaataatatgcacatataggcatgcacccccctatataggagatcatattgtagatcttaacaatgtagatgaacaaagtggattatatagatatcacatgggtggcatcgaagggtggtgtcaaaaactgtggaccatagaagctatatcactattggatctaatatctctcaaagggaaattctcaattactgctttaattaatggtgacaatcaatcaatagatataagcaaaccaatcagactcatggaaggtcaaactcatgctcaagcagattatttgctagcattaaatagccttaaattactgtataaagagtatgcaggcataggccacaaattaaaaggaactgagacttatatatcacgagatatgcaatttatgagtaaaacaattcaacataacggtgtatattacccagctagtataaagaaagtcctaagagtgggaccgtggataaacactatacttgatgatttcaaagtgagtctagaatctataggtagtttgacacaagaattagaatatagaggtgaaagtctattatgcagtttaatatttagaaatgtatggttatataatcagattgctctacaattaaaaaatcatgcattatgtaacaataaactatatttggacatattaaaggttctgaaacacttaaaaaccttttttaatcttgataatattgatacagcattaacattgtatatgaatttacccatgttatttggtggtggtgatcccaacttgttatatcgaagtttctatagaagaactcctgacttcctcacagaggctatagttcactctgtgttcatacttagttattatacaaaccatgacttaaaagataaacttcaagatctgtcagatgatagattgaataagttcttaacatgcataatcacgtttgacaaaaaccctaatgctgaattcgtaacattgatgagagatcctcaagctttagggtctgagagacaagctaaaattactagcgaaatcaatagactggcagttacagaggttttgagtacagctccaaacaaaatattctccaaaagtgcacaacattatactactacagagatagatctaaatgatattatgcaaaatatagaacctacatatcctcatgggctaagagttgtttatgaaagtttacccttttataaagcagagaaaatagtaaatcttatatcaggtacaaaatctataactaacatactggaaaaaacttctgccatagacttaacagatattgatagagccactgagatgatgaggaaaaacataactttgcttataaggatacttccattggattgtaacagagataaaagagagatattgagtatggaaaacctaagtattactgaattaagcaaatatgttagggaaagatcttggtctttatccaatatagttggtgttacatcacccagtatcatgtatacaatggacatcaaatatactacaagcactatatctagtggcataattatagagaaatataatgttaacagtttaacacgtggtgagagaggacccactaaaccatgggttggttcatctacacaagagaaaaaaacaatgccagtttataatagacaagtcttaaccaaaaaacagagagatcaaatagatctattagcaaaattggattgggtgtatgcatctatagataacaaggatgaattcatggaagaactcagcataggaacccttgggttaacatatgaaaaggccaagaaattatttccacaatatttaagtgtcaattatttgcatcgccttacagtcagtagtagaccatgtgaattccctgcatcaataccagcttatagaacaacaaattatcactttgacactagccctattaatcgcatattaacagaaaagtatggtgatgaagatattgacatagtattccaaaactgtataagctttggccttagtttaatgtcagtagtagaacaatttactaatgtatgtcctaacagaattattctcatacctaagcttaatgagatacatttgatgaaacctcccatattcacaggtgatgttgatattcacaagttaaaacaagtgatacaaaaacagcatatgtttttaccagacaaaataagtttgactcaatatgtggaattattcttaagtaataaaacactcaaatctggatctcatgttaattctaatttaatattggcacataaaatatctgactattttcataatacttacattttaagtactaatttagctggacattggattctgattatacaacttatgaaagattctaaaggtatttttgaaaaagattggggagagggatatataactgatcatatgtttattaatttgaaagttttcttcaatgcttataagacctatctcttgtgttttcataaaggttatggcaaagcaaagctggagtgtgatatgaacacttcagatcttctatgtgtattggaattaatagacagtagttattggaagtctatgtctaaggtatttttagaacaaaaagttatcaaatacattcttagccaagatgcaagtttacatagagtaaaaggatgtcatagcttcaaattatggtttcttaaacgtcttaatgtagcagaattcacagtttgcccttgggttgttaacatagattatcatccaacacatatgaaagcaatattaacttatatagatcttgttagaatgggattgataaatatagatagaatacacattaaaaataaacacaaattcaatgatgaattttatacttctaatctcttctacattaattataacttctcagataatactcatctattaactaaacatataaggattgctaattctgaattagaaaataattacaacaaattatatcatcctacaccagaaaccctagagaatatactagccaatccgattaaaagtaatgacaaaaagacactgaatgactattgtataggtaaaaatgttgactcaataatgttaccattgttatctaataagaagcttattaaatcgtctgcaatgattagaaccaattacagcaaacaagatttgtataatttattccctatggttgtgattgatagaattatagatcattcaggcaatacagccaaatccaaccaactttacactactacttcccaccaaatatctttagtgcacaatagcacatcactttactgcatgcttccttggcatcatattaatagattcaattttgtatttagttctacaggttgtaaaattagtatagagtatattttaaaagatcttaaaattaaagatcccaattgtatagcattcataggtgaaggagcagggaatttattattgcgtacagtagtggaacttcatcctgacataagatatatttacagaagtctgaaagattgcaatgatcatagtttacctattgagtttttaaggctgtacaatggacatatcaacattgattatggtgaaaatttgaccattcctgctacagatgcaaccaacaacattcattggtcttatttacatataaagtttgctgaacctatcagtctttttgtctgtgatgccgaattgtctgtaacagtcaactggagtaaaattataatagaatggagcaagcatgtaagaaagtgcaagtactgttcctcagttaataaatgtatgttaatagtaaaatatcatgctcaagatgatattgatttcaaattagacaatataactatattaaaaacttatgtatgcttaggcagtaagttaaagggatcggaggtttacttagtccttacaataggtcctgcgaatatattcccagtatttaatgtagtacaaaatgctaaattgatactatcaagaaccaaaaatttcatcatgcctaagaaagctgataaagagtctattgatgcaaatattaaaagtttgataccctttctttgttaccctataacaaaaaaaggaattaatactgcattgtcaaaactaaagagtgttgttagtggagatatactatcatattctatagctggacgtaatgaagttttcagcaataaacttataaatcataagcatatgaacatcttaaaatggttcaatcatgttttaaatttcagatcaacagaactaaactataaccatttatatatggtagaatctacatatccttacctaagtgaattgttaaacagcttgacaaccaatgaacttaaaaaactgattaaaatcacaggtagtctgttatacaactttcataatgaataatgaataaagatcttataataaaaattcccatagctatacactaacactgtattcaattatagttattaaaaattaaaaatcgtacgattttttaaataacttttagtgaactaatcctaaagttatcattttaatcttggaggaataaatttaaaccctaatctaattggtttatatgtgtattaactaaattacgagatattagtttttgacactttttttctcgtgggtcggcatggcatctccacctcctcgcggtccgacctgggcatccgaaggaggacgcacgtccactcggatggctaagggagctgctaacaaagcccgaaaggaagctgagttggctgctgccaccgctgagcaataactagcataaccccttggggcctctaaacgggtcttgaggggttttttgctgaaaggaggaactatatacgcgtaagcttctcgacccattctcatgtttgacagcttatcatcgaatttctgccattcatccgcttattatcacttattcaggcgtagcaaccaggcgtttaagggcaccaataactgccttaaaaaaattacgccccgccctgccactcatcgcagtactgttgtaattcattaagcattctgccgacatggaagccatcacagacggcatgatgaacctgaatcgccagcggcatcagcaccttgtcgccttgcgtataatatttgcccatggtgaaaacgggggcgaagaagttgtccatattggccacgtttaaatcaaaactggtgaaactcacccagggattggctgagacgaaaaacatattctcaataaaccctttagggaaataggccaggttttcaccgtaacacgccacatcttgcgaatatatgtgtagaaactgccggaaatcgtcgtggtattcactccagagcgatgaaaacgtttcagtttgctcatggaaaacggtgtaacaagggtgaacactatcccatatcaccagctcaccgtctttcattgccatacggaattccggatgagcattcatcaggcgggcaagaatgtgaataaaggccggataaaacttgtgcttatttttctttacggtctttaaaaaggccgtaatatccagctgaacggtctggttataggtacattgagcaactgactgaaatgcctcaaaatgttctttacgatgccattgggatatatcaacggtggtatatccagtgatttttttctccattttagcttccttagctcctgaaaatctcgataactcaaaaaatacgcccggtagtgatcttatttcattatggtgaaagttggaacctcttacgtgccgatcaacgtctcattttcgccaaaagttggcccagggcttcccggtatcaacagggacaccaggatttatttattctgcgaagtgatcttccgtcacaggtatttattcgcgataagctcatggagcggcgtaaccgtcgcacaggaaggacagagaaagcgcggatctgggaagtgacggacagaacggtcaggacctggattggggaggcggttgccgccgctgctgctgacggtgtgacgttctctgttccggtcacaccacatacgttccgccattcctatgcgatgcacatgctgtatgccggtataccgctgaaagttctgcaaagcctgatgggacataagtccatcagttcaacggaagtctacacgaaggtttttgcgctggatgtggctgcccggcaccgggtgcagtttgcgatgccggagtctgatgcggttgcgatgctgaaacaattatcctgagaataaatgccttggcctttatatggaaatgtggaactgagtggatatgctgtttttgtctgttaaacagagaagctggctgttatccactgagaagcgaacgaaacagtcgggaaaatctcccattatcgtagagatccgcattattaatctcaggagcctgtgtagcgtttataggaagtagtgttctgtcatgatgcctgcaagcggtaacgaaaacgatttgaatatgccttcaggaacaatagaaatcttcgtgcggtgttacgttgaagtggagcggattatgtcagcaatggacagaacaacctaatgaacacagaaccatgatgtggtctgtccttttacagccagtaggctcgccgcagtcgagcgacggcgaagccctcgagtgagcgaggaagcaccagggaacagcacttatatattctgcttacacacgatgcctgaaaaaacttcccttggggttatccacttatccacggggatatttttataattattttttttatagtttttagatcttcttttttagagcgccttgtaggcctttatccatgctggttctagagaaggtgttgtgacaaattgccctttcagtgtgacaaatcaccctcaaatgacagtcctgtctgtgacaaattgcccttaaccctgtgacaaattgccctcagaagaagctgttttttcacaaagttatccctgcttattgactcttttttatttagtgtgacaatctaaaaacttgtcacacttcacatggatctgtcatggcggaaacagcggttatcaatcacaagaaacgtaaaaatagcccgcgaatcgtccagtcaaacgacctcactgaggcggcatatagtctctcccgggatcaaaaacgtatgctgtatctgttcgttgaccagatcagaaaatctgatggcaccctacaggaacatgacggtatctgcgagatccatgttgctaaatatgctgaaatattcggattgacctctgcggaagccagtaaggatatacggcaggcattgaagagtttcgcggggaaggaagtggttttttatcgccctgaagaggatgccggcgatgaaaaaggctatgaatcttttccttggtttatcaaacgtgcgcacagtccatccagagggctttacagtgtacatatcaacccatatctcattcccttctttatcgggttacagaaccggtttacgcagtttcggcttagtgaaacaaaagaaatcaccaatccgtatgccatgcgtttatacgaatccctgtgtcagtatcgtaagccggatggctcaggcatcgtctctctgaaaatcgactggatcatagagcgttaccagctgcctcaaagttaccagcgtatgcctgacttccgccgccgcttcctgcaggtctgtgttaatgagatcaacagcagaactccaatgcgcctctcatacattgagaaaaagaaaggccgccagacgactcatatcgtattttccttccgcgatatcacttccatgacgacaggatagtctgagggttatctgtcacagatttgagggtggttcgtcacatttgttctgacctactgagggtaatttgtcacagttttgctgtttccttcagcctgcatggattttctcatactttttgaactgtaatttttaaggaagccaaatttgagggcagtttgtcacagttgatttccttctctttcccttcgtcatgtgacctgatatcgggggttagttcgtcatcattgatgagggttgattatcacagtttattactctgaattggctatccgcgtgtgtacctctacctggagtttttcccacggtggatatttcttcttgcgctgagcgtaagagctatctgacagaacagttcttctttgcttcctcgccagttcgctcgctatgctcggttacacggctgcggcgagcgctagtgataataagtgactgaggtatgtgctcttcttatctccttttgtagtgttgctcttattttaaacaactttgcggttttttgatgactttgcgattttgttgttgctttgcagtaaattgcaagatttaataaaaaaacgcaaagcaatgattaaaggatgttcagaatgaaactcatggaaacacttaaccagtgcataaacgctggtcatgaaatgacgaaggctatcgccattgcacagtttaatgatgacagcccggaagcgaggaaaataacccggcgctggagaataggtgaagcagcggatttagttggggtttcttctcaggctatcagagatgccgagaaagcagggcgactaccgcacccggatatggaaattcgaggacgggttgagcaacgtgttggttatacaattgaacaaattaatcatatgcgtgatgtgtttggtacgcgattgcgacgtgctgaagacgtatttccaccggtgatcggggttgctgcccataaaggtggcgtttacaaaacctcagtttctgttcatcttgctcaggatctggctctgaaggggctacgtgttttgctcgtggaaggtaacgacccccagggaacagcctcaatgtatcacggatgggtaccagatcttcatattcatgcagaagacactctcctgcctttctatcttggggaaaaggacgatgtcacttatgcaataaagcccacttgctggccggggcttgacattattccttcctgtctggctctgcaccgtattgaaactgagttaatgggcaaatttgatgaaggtaaactgcccaccgatccacacctgatgctccgactggccattgaaactgttgctcatgactatgatgtcatagttattgacagcgcgcctaacctgggtatcggcacgattaatgtcgtatgtgctgctgatgtgctgattgttcccacgcctgctgagttgtttgactacacctccgcactgcagtttttcgatatgcttcgtgatctgctcaagaacgttgatcttaaagggttcgagcctgatgtacgtattttgcttaccaaatacagcaatagtaatggctctcagtccccgtggatggaggagcaaattcgggatgcctggggaagcatggttctaaaaaatgttgtacgtgaaacggatgaagttggtaaaggtcagatccggatgagaactgtttttgaacaggccattgatcaacgctcttcaactggtgcctggagaaatgctctttctatttgggaacctgtctgcaatgaaattttcgatcgtctgattaaaccacgctgggagattagataatgaagcgtgcgcctgttattccaaaacatacgctcaatactcaaccggttgaagatacttcgttatcgacaccagctgccccgatggtggattcgttaattgcgcgcgtaggagtaatggctcgcggtaatgccattactttgcctgtatgtggtcgggatgtgaagtttactcttgaagtgctccggggtgatagtgttgagaagacctctcgggtatggtcaggtaatgaacgtgaccaggagctgcttactgaggacgcactggatgatctcatcccttcttttctactgactggtcaacagacaccggcgttcggtcgaagagtatctggtgtcatagaaattgccgatgggagtcgccgtcgtaaagctgctgcacttaccgaaagtgattatcgtgttctggttggcgagctggatgatgagcagatggctgcattatccagattgggtaacgattatcgcccaacaagtgcttatgaacgtggtcagcgttatgcaagccgattgcagaatgaatttgctggaaatatttctgcgctggctgatgcggaaaatatttcacgtaagattattacccgctgtatcaacaccgccaaattgcctaaatcagttgttgctcttttttctcaccccggtgaactatctgcccggtcaggtgatgcacttcaaaaagcctttacagataaagaggaattacttaagcagcaggcatctaaccttcatgagcagaaaaaagctggggtgatatttgaagctgaagaagttatcactcttttaacttctgtgcttaaaacgtcatctgcatcaagaactagtttaagctcacgacatcagtttgctcctggagcgacagtattgtataagggcgataaaatggtgcttaacctggacaggtctcgtgttccaactgagtgtatagagaaaattgaggccattcttaaggaacttgaaaagccagcaccctgatgcgaccacgttttagtctacgtttatctgtctttacttaatgtcctttgttacaggccagaaagcataactggcctgaatattctctctgggcccactgttccacttgtatcgtcggtctgataatcagactgggaccacggtcccactcgtatcgtcggtctgattattagtctgggaccacggtcccactcgtatcgtcggtctgattattagtctgggaccacggtcccactcgtatcgtcggtctgataatcagactgggaccacggtcccactcgtatcgtcggtctgattattagtctgggaccatggtcccactcgtatcgtcggtctgattattagtctgggaccacggtcccactcgtatcgtcggtctgattattagtctggaaccacggtcccactcgtatcgtcggtctgattattagtctgggaccacggtcccactcgtatcgtcggtctgattattagtctgggaccacgatcccactcgtgttgtcggtctgattatcggtctgggaccacggtcccacttgtattgtcgatcagactatcagcgtgagactacgattccatcaatgcctgtcaagggcaagtattgacatgtcgtcgtaacctgtagaacggagtaacctcggtgtgcggttgtatgcctgctgtggattgctgctgtgtcctgcttatccacaacattttgcgcacggttatgtggacaaaatacctggttacccaggccgtgccggcacgttaaccgggctgcatccgatgcaagtgtgtcgctgtcgagttt

SEQ ID NO: 98 - protein, 1284 aa, Artificial Sequence
  Description of Artificial Sequence: Synthetic polypeptide
MFVFLVLLPLVSSQCVNLTTRTQLPPAYTNSFTRGVYYPDKVFRSSVLHSTQDLFLPFFSNVTWFHAIHVSGTNGTKRFDNPVLPFNDGVYFASTEKSNIIRGWIFGTTLDSKTQSLLIVNNATNVVIKVCEFQFCNDPFLGVYYHKNNKSWMESEFRVYSSANNCTFEYVSQPFLMDLEGKQGNFKNLREFVFKNIDGYFKIYSKHTPINLVRDLPQGFSALEPLVDLPIGINITRFQTLLALHRSYLTPGDSSSGWTAGAAAYYVGYLQPRTFLLKYNENGTITDAVDCALDPLSETKCTLKSFTVEKGIYQTSNFRVQPTESIVRFPNITNLCPFGEVFNATRFASVYAWNRKRISNCVADYSVLYNSASFSTFKCYGVSPTKLNDLCFTNVYADSFVIRGDEVRQIAPGQTGKIADYNYKLPDDFTGCVIAWNSNNLDSKVGGNYNYLYRLFRKSNLKPFERDISTEIYQAGSTPCNGVEGFNCYFPLQSYGFQPTNGVGYQPYRVVVLSFELLHAPATVCGPKKSTNLVKNKCVNFNFNGLTGTGVLTESNKKFLPFQQFGRDIADTTDAVRDPQTLEILDITPCSFGGVSVITPGTNTSNQVAVLYQDVNCTEVPVAIHADQLTPTWRVYSTGSNVFQTRAGCLIGAEHVNNSYECDIPIGAGICASYQTQTNSPRRARSVASQSIIAYTMSLGAENSVAYSNNSIAIPTNFTISVTTEILPVSMTKTSVDCTMYICGDSTECSNLLLQYGSFCTQLNRALTGIAVEQDKNTQEVFAQVKQIYKTPPIKDFGGFNFSQILPDPSKPSKRSFIEDLLFNKVTLADAGFIKQYGDCLGDIAARDLICAQKFNGLTVLPPLLTDEMIAQYTSALLAGTITSGWTFGAGAALQIPFAMQMAYRFNGIGVTQNVLYENQKLIANQFNSAIGKIQDSLSSTASALGKLQDVVNQNAQALNTLVKQLSSNFGAISSVLNDILSRLDKVEAEVQIDRLITGRLQSLQTYVTQQLIRAAEIRASANLAATKMSECVLGQSKRVDFCGKGYHLMSFPQSAPHGVVFLHVTYVPAQEKNFTTAPAICHDGKAHFPREGVFVSNGTHWFVTQRNFYEPQIITTDNTFVSGNCDVVIGIVNNTVYDPLQPELDSFKEELDKYFKNHTSPDVDLGDISGINASVVNIQKEIDRLNEVAKNLNESLIDLQELGKYEQYIKWPWYIWLGFIAGLIAIVMVTIMLCCMTSCCSCLKGCCSCGSCCGLLLYCKARSTPITLSKDQLSGINNIAFSN

SEQ ID NO: 99 - DNA, 3855 bp, Artificial Sequence
  Description of Artificial Sequence: Synthetic polynucleotide
atgtttgtttttcttgttttattgccactagtctctagtcagtgtgttaatcttacaaccagaactcaattaccccctgcatacactaattctttcacacgtggtgtttattaccctgacaaagttttcagatcctcagttttacattcaactcaggacttgttcttacctttcttttccaatgttacttggttccatgctatacatgtctctgggaccaatggtactaagaggtttgataaccctgtcctaccatttaatgatggtgtttattttgcttccactgagaagtctaacataataagaggctggatttttggtactactttagattcgaagacccagtccctacttattgttaataacgctactaatgttgttattaaagtctgtgaatttcaattttgtaatgatccatttttgggtgtttattaccacaaaaacaacaaaagttggatggaaagtgagttcagagtttattctagtgcgaataattgcacttttgaatatgtctctcagccttttcttatggaccttgaaggaaaacagggtaatttcaaaaatcttagggaatttgtgtttaagaatattgatggttattttaaaatatattctaagcacacgcctattaatttagtgcgtgatctccctcagggtttttcggctttagaaccattggtagatttgccaataggtattaacatcactaggtttcaaactttacttgctttacatagaagttatttgactcctggtgattcttcttcaggttggacagctggtgctgcagcttattatgtgggttatcttcaacctaggacttttctattaaaatataatgaaaatggaaccattacagatgctgtagactgtgcacttgaccctctctcagaaacaaagtgtacgttgaaatccttcactgtagaaaaaggaatctatcaaacttctaactttagagtccaaccaacagaatctattgttagatttcctaatattacaaacttgtgcccttttggtgaagtttttaacgccaccagatttgcatctgtttatgcttggaacaggaagagaatcagcaactgtgttgctgattattctgtcctatataattccgcatcattttccacttttaagtgttatggagtgtctcctactaaattaaatgatctctgctttactaatgtctatgcagattcatttgtaattagaggtgatgaagtcagacaaatcgctccagggcaaactggaaagattgctgattataattataaattaccagatgattttacaggctgcgttatagcttggaattctaacaatcttgattctaaggttggtggtaattataattacctgtatagattgtttaggaagtctaatctcaaaccttttgagagagatatttcaactgaaatctatcaggccggtagcacaccttgtaatggtgttgaaggttttaattgttactttcctttacaatcatatggtttccaacccactaatggtgttggttaccaaccatacagagtagtagtactttcttttgaacttctacatgcaccagcaactgtttgtggacctaaaaagtctactaatttggttaaaaacaaatgtgtcaatttcaacttcaatggtttaacaggcacaggtgttcttactgagtctaacaaaaagtttctgcctttccaacaatttggcagagacattgctgacactactgatgctgtccgtgatccacagacacttgagattcttgacattacaccatgttcttttggtggtgtcagtgttataacaccaggaacaaatacttctaaccaggttgctgttctttatcaggatgttaactgcacagaagtccctgttgctattcatgcagatcaacttactcctacttggcgtgtttattctacaggttctaatgtttttcaaacacgtgcaggctgtttaataggggctgaacatgtcaacaactcatatgagtgtgacatacccattggtgcaggtatatgcgctagttatcagactcagactaattctcctcggcgggcacgtagtgtagctagtcaatccatcattgcctacactatgtcacttggtgcagaaaattcagttgcttactctaataactctattgccatacccacaaattttactattagtgttaccacagaaattctaccagtgtctatgaccaagacatcagtagattgtacaatgtacatttgtggtgattcaactgaatgcagcaatcttttgttgcaatatggcagtttttgtacacaattaaaccgtgctttaactggaatagctgttgaacaagacaaaaacacccaagaagtttttgcacaagtcaaacaaatttacaaaacaccaccaattaaagattttggtggttttaatttttcacaaatattaccagatccatcaaaaccaagcaagaggtcatttattgaagatctacttttcaacaaagtgacacttgcagatgctggcttcatcaaacaatatggtgattgccttggtgatattgctgctagagacctcatttgtgcacaaaagtttaacggccttactgttttgccacctttgctcacagatgaaatgattgctcaatacacttctgcactgttagcgggtacaatcacttctggttggacctttggtgcaggtgctgcattacaaataccatttgctatgcaaatggcttataggtttaatggtattggagttacacagaatgttctctatgagaaccaaaaattgattgccaaccaatttaatagtgctattggcaaaattcaagactcactttcttccacagcaagtgcacttggaaaacttcaagatgtggtcaaccaaaatgcacaagctttaaacacgcttgttaaacaacttagctccaattttggtgcaatttcaagtgttttaaatgatatcctttcacgtcttgacaaagttgaggctgaagtgcaaattgataggttgatcacaggcagacttcaaagtttgcagacatatgtgactcaacaattaattagagctgcagaaatcagagcttctgctaatcttgctgctactaaaatgtcagagtgtgtacttggacaatcaaaaagagttgatttttgtggaaagggctatcatcttatgtccttccctcagtcagcacctcatggtgtagtcttcttgcatgtgacttatgtccctgcacaagaaaagaacttcacaactgctcctgccatttgtcatgatggaaaagcacactttcctcgtgaaggtgtctttgtttcaaatggcacacactggtttgtaacacaaaggaatttttatgaaccacaaatcattactacagacaacacatttgtgtctggtaactgtgatgttgtaataggaattgtcaacaacacagtttatgatcctttgcaacctgaattagactcattcaaggaggagttagataaatattttaagaatcatacatcaccagatgttgatttaggtgacatctctggcattaatgcttcagttgtaaacattcaaaaagaaattgaccgcctcaatgaggttgccaagaatttaaatgaatctctcatcgatctccaagaacttggaaagtatgagcagtatataaaatggccatggtacatttggctaggttttatagctggcttgattgccatagtaatggtgacaattatgctttgctgtatgaccagttgctgtagttgtctcaagggctgttgttcttgtggatcctgctgcggactgctcctatactgtaaggccagaagcacaccaatcacactaagcaaggatcaactgagtggtataaataatattgcatttagtaactaa

SEQ ID NO: 100 - DNA, 16731 bp, Artificial Sequence
  Description of Artificial Sequence: Synthetic polynucleotide
acgcgaaaaaatgcgtacaacaaacttgcataaaccaaaaaaatggggcaaataagaatttgataagtaccacttaaatttaactcccttgcttagcgatggtgagcgagctgattaaggagaacatgcacatgaagctgtacatggagggcaccgtgaacaaccaccacttcaagtgcacatccgagggcgaaggcaagccctacgagggcacccagaccatgagaatcaaggcggtcgagggcggccctctccccttcgccttcgacatcctggctaccagcttcatgtacggcagcaaaaccttcatcaaccacacccagggcatccccgacttctttaagcagtccttccccgagggcttcacatgggagagagtcaccacatacgaagacgggggcgtgctgaccgctacccaggacaccagcctccaggacggctgcctcatctacaacgtcaagatcagaggggtgaacttcccatccaacggccctgtgatgcagaagaaaacactcggctgggaggcctccaccgagaccctgtaccccgctgacggcggcctggaaggcagagccgacatggccctgaagctcgtgggcgggggccacctgatctgcaacttgaagaccacatacagatccaagaaacccgctaagaacctcaagatgcccggcgtctactatgtggacagaagactggaaagaatcaaggaggccgacaaagagacctacgtcgagcagcacgaggtggctgtggccagatactgcgacctccctagcaaactggggcacagatgagtattcaattatagttattaaaaacttaacagaagacaaaaatggggcaaataagaatttgataagtaccacttaaatttaactcccttgcttagcgatgggttcgaattcgctatcgatgataaaagtacgtctacaaaatctatttgataatgatgaagtagcgctactaaaaataacgtgttatacggataaactaatacatctaacgaatgcgctagcgaaagcggtaatacatacgataaaactaaatggtatagtatttgtacatgtaataacgtcgtcggatatatgtccgaataataatatagtagtaaaatcgaattttacgacgatgccggtactacaaaatggtggttatatatgggaaatgatggaactaacgcattgttcgcaaccgaatggtctactagatgataattgtgaaataaaattttcgaaaaaactatcggattcgacgatgacgaattatatgaatcaactatcggaactactaggttttgatctaaatccgtaaattataattaatatcaactagcaaatcaatgtcactaacaccattagttaatataaaacttaacagaagacaaaaatggggcaaataaatcaattcagccaacccaaccatggatacgacgcataatgataatacgccgcaacgtctaatgataacggatatgcgtccgctatcgctagaaacgataataacgtcgctaacgcgtgatataataacgcataaatttatatatctaataaatcatgaatgtatagtacgtaaactagatgaacgtcaagcgacgtttacgtttctagtaaattatgaaatgaaactactacataaagtaggttcgacgaaatataaaaaatatacggaatataatacgaaatatggtacgtttccgatgccgatatttataaatcatgatggttttctagaatgtataggtataaaaccgacgaaacatacgccgataatatataaatatgatctaaatccgtaaatttcaacacaatattcacacaatctaaaacaacaactctatgcataactatactccatagtccagatggagcctgaaaattatagtaatttaaaattaaggagagatataagatagaagatggggcaaatacaaagatggctcttagcaaagtcaagttgaatgatacactcaacaaagatcaacttctgtcatccagcaaatacaccatccaacggagcacaggagatagtattgatactcctaattatgatgtgcagaaacacatcaataagttatgtggcatgttattaatcacagaagatgctaatcataaattcactgggttaataggtatgttatatgcgatgtctaggttaggaagagaagacaccataaaaatactcagagatgcgggatatcatgtaaaagcaaatggagtagatgtaacaacacatcgtcaagacattaatggaaaagaaatgaaatttgaagtgttaacattggcaagcttaacaactgaaattcaaatcaacattgagatagaatctagaaaatcctacaaaaaaatgctaaaagaaatgggagaggtagctccagaatacaggcatgactctcctgattgtgggatgataatattatgtatagcagcattagtaataactaaattagcagcaggggacagatctggtcttacagccgtgattaggagagctaataatgtcctaaaaaatgaaatgaaacgttacaaaggcttactacccaaggacatagccaacagcttctatgaagtgtttgaaaaacatccccactttatagatgtttttgttcattttggtatagcacaatcttctaccagaggtggcagtagagttgaagggatttttgcaggattgtttatgaatgcctatggtgcagggcaagtgatgttacggtggggagtcttagcaaaatcagttaaaaatattatgttaggacatgctagtgtgcaagcagaaatggaacaagttgttgaggtttatgaatatgcccaaaaattgggtggtgaagcaggattctaccatatattgaacaacccaaaagcatcattattatctttgactcaatttcctcacttctccagtgtagtattaggcaatgctgctggcctaggcataatgggagagtacagaggtacaccgaggaatcaagatctatatgatgcagcaaaggcatatgctgaacaactcaaagaaaatggtgtgattaactacagtgtactagacttgacagcagaagaactagaggctatcaaacatcagcttaatccaaaagataatgatgtagagctttgagttaataaaaaatggggcaaataaatcatcatggaaaagtttgctcctgaattccatggagaagatgcaaacaacagggctactaaattcctagaatcaataaagggcaaattcacatcacccaaagatcccaagaaaaaagatagtatcatatctgtcaactcaatagatatagaagtaaccaaagaaagccctataacatcaaattcaactattatcaacccaacaaatgagacagatgatactgcagggaacaagcccaattatcaaagaaaacctctagtaagtttcaaagaagaccctacaccaagtgataatcccttttctaaactatacaaagaaaccatagaaacatttgataacaatgaagaagaatccagctattcatacgaagaaataaatgatcagacaaacgataatataacagcaagattagataggattgatgaaaaattaagtgaaatactaggaatgcttcacacattagtagtggcaagtgcaggacctacatctgctcgggatggtataagagatgccatgattggtttaagagaagaaatgatagaaaaaatcagaactgaagcattaatgaccaatgacagattagaagctatggcaagactcaggaatgaggaaagtgaaaagatggcaaaagacacatcagatgaagtgtctctcaatccaacatcagagaaattgaacaacctattggaagggaatgatagtgacaatgatctatcacttgaagatttctgattagttaccactcttcacatcaacacacaataccaacagaagaccaacaaactaaccaacccaatcatccaaccaaacatccatccgccaatcagccaaacagccaacaaaacaaccagccaatccaaaactaaccacccggaaaaaatctataatatagttacaaaaaaaggaaagggtggggcaaatatggaaacatacgtgaacaagcttcacgaaggctccacatacacagctgctgttcaatacaatgtcttagaaaaagacgatgaccctgcatcacttacaatatgggtgcccatgttccaatcatctatgccagcagatttacttataaaagaactagctaatgtcaacatactagtgaaacaaatatccacacccaagggaccttcactaagagtcatgataaactcaagaagtgcagtgctagcacaaatgcccagcaaatttaccatatgcgctaatgtgtccttggatgaaagaagcaaactagcatatgatgtaaccacaccctgtgaaatcaaggcatgtagtctaacatgcctaaaatcaaaaaatatgttgactacagttaaagatctcactatgaagacactcaaccctacacatgatattattgctttatgtgaatttgaaaacatagtaacatcaaaaaaagtcataataccaacatacctaagatccatcagtgtcagaaataaagatctgaacacacttgaaaatataacaaccactgaattcaaaaatgctatcacaaatgcaaaaatcatcccttactcaggattactattagtcatcacagtgactgacaacaaaggagcattcaaatacataaagccacaaagtcaattcatagtagatcttggagcttacctagaaaaagaaagtatatattatgttaccacaaattggaagcacacagctacacgatttgcaatcaaacccatggaagattaacctttttcctctacatcagtgtgttaattcatacaaactttctacctacattcttcacttcaccatcacaatcacaaacactctgtggttcaaccaatcaaacaaaacttatctgaagtcccagatcatcccaagtcattgtttatcagatctagtactcaaataagttaataaaaaatatacacatggacgtccatggggcaaatgcaaacatgtttgtttttcttgttttattgccactagtctctagtcagtgtgttaatcttacaaccagaactcaattaccccctgcatacactaattctttcacacgtggtgtttattaccctgacaaagttttcagatcctcagttttacattcaactcaggacttgttcttacctttcttttccaatgttacttggttccatgctatacatgtctctgggaccaatggtactaagaggtttgataaccctgtcctaccatttaatgatggtgtttattttgcttccactgagaagtctaacataataagaggctggatttttggtactactttagattcgaagacccagtccctacttattgttaataacgctactaatgttgttattaaagtctgtgaatttcaattttgtaatgatccatttttgggtgtttattaccacaaaaacaacaaaagttggatggaaagtgagttcagagtttattctagtgcgaataattgcacttttgaatatgtctctcagccttttcttatggaccttgaaggaaaacagggtaatttcaaaaatcttagggaatttgtgtttaagaatattgatggttattttaaaatatattctaagcacacgcctattaatttagtgcgtgatctccctcagggtttttcggctttagaaccattggtagatttgccaataggtattaacatcactaggtttcaaactttacttgctttacatagaagttatttgactcctggtgattcttcttcaggttggacagctggtgctgcagcttattatgtgggttatcttcaacctaggacttttctattaaaatataatgaaaatggaaccattacagatgctgtagactgtgcacttgaccctctctcagaaacaaagtgtacgttgaaatccttcactgtagaaaaaggaatctatcaaacttctaactttagagtccaaccaacagaatctattgttagatttcctaatattacaaacttgtgcccttttggtgaagtttttaacgccaccagatttgcatctgtttatgcttggaacaggaagagaatcagcaactgtgttgctgattattctgtcctatataattccgcatcattttccacttttaagtgttatggagtgtctcctactaaattaaatgatctctgctttactaatgtctatgcagattcatttgtaattagaggtgatgaagtcagacaaatcgctccagggcaaactggaaagattgctgattataattataaattaccagatgattttacaggctgcgttatagcttggaattctaacaatcttgattctaaggttggtggtaattataattacctgtatagattgtttaggaagtctaatctcaaaccttttgagagagatatttcaactgaaatctatcaggccggtagcacaccttgtaatggtgttgaaggttttaattgttactttcctttacaatcatatggtttccaacccactaatggtgttggttaccaaccatacagagtagtagtactttcttttgaacttctacatgcaccagcaactgtttgtggacctaaaaagtctactaatttggttaaaaacaaatgtgtcaatttcaacttcaatggtttaacaggcacaggtgttcttactgagtctaacaaaaagtttctgcctttccaacaatttggcagagacattgctgacactactgatgctgtccgtgatccacagacacttgagattcttgacattacaccatgttcttttggtggtgtcagtgttataacaccaggaacaaatacttctaaccaggttgctgttctttatcaggatgttaactgcacagaagtccctgttgctattcatgcagatcaacttactcctacttggcgtgtttattctacaggttctaatgtttttcaaacacgtgcaggctgtttaataggggctgaacatgtcaacaactcatatgagtgtgacatacccattggtgcaggtatatgcgctagttatcagactcagactaattctcctcggcgggcacgtagtgtagctagtcaatccatcattgcctacactatgtcacttggtgcagaaaattcagttgcttactctaataactctattgccatacccacaaattttactattagtgttaccacagaaattctaccagtgtctatgaccaagacatcagtagattgtacaatgtacatttgtggtgattcaactgaatgcagcaatcttttgttgcaatatggcagtttttgtacacaattaaaccgtgctttaactggaatagctgttgaacaagacaaaaacacccaagaagtttttgcacaagtcaaacaaatttacaaaacaccaccaattaaagattttggtggttttaatttttcacaaatattaccagatccatcaaaaccaagcaagaggtcatttattgaagatctacttttcaacaaagtgacacttgcagatgctggcttcatcaaacaatatggtgattgccttggtgatattgctgctagagacctcatttgtgcacaaaagtttaacggccttactgttttgccacctttgctcacagatgaaatgattgctcaatacacttctgcactgttagcgggtacaatcacttctggttggacctttggtgcaggtgctgcattacaaataccatttgctatgcaaatggcttataggtttaatggtattggagttacacagaatgttctctatgagaaccaaaaattgattgccaaccaatttaatagtgctattggcaaaattcaagactcactttcttccacagcaagtgcacttggaaaacttcaagatgtggtcaaccaaaatgcacaagctttaaacacgcttgttaaacaacttagctccaattttggtgcaatttcaagtgttttaaatgatatcctttcacgtcttgacaaagttgaggctgaagtgcaaattgataggttgatcacaggcagacttcaaagtttgcagacatatgtgactcaacaattaattagagctgcagaaatcagagcttctgctaatcttgctgctactaaaatgtcagagtgtgtacttggacaatcaaaaagagttgatttttgtggaaagggctatcatcttatgtccttccctcagtcagcacctcatggtgtagtcttcttgcatgtgacttatgtccctgcacaagaaaagaacttcacaactgctcctgccatttgtcatgatggaaaagcacactttcctcgtgaaggtgtctttgtttcaaatggcacacactggtttgtaacacaaaggaatttttatgaaccacaaatcattactacagacaacacatttgtgtctggtaactgtgatgttgtaataggaattgtcaacaacacagtttatgatcctttgcaacctgaattagactcattcaaggaggagttagataaatattttaagaatcatacatcaccagatgttgatttaggtgacatctctggcattaatgcttcagttgtaaacattcaaaaagaaattgaccgcctcaatgaggttgccaagaatttaaatgaatctctcatcgatctccaagaacttggaaagtatgagcagtatataaaatggccatggtacatttggctaggttttatagctggcttgattgccatagtaatggtgacaattatgctttgctgtatgaccagttgctgtagttgtctcaagggctgttgttcttgtggatcctgctgcggactgctcctatactgtaaggccagaagcacaccaatcacactaagcaaggatcaactgagtggtataaataatattgcatttagtaactaaataaaaatagcacctaatcatgttcttacaatggtttactatctgctcatagacaacccatctatcattggattttcttaaaatctgaacttcatcgaaactcttatctataaaccatctcacttacactatttaagtagattcctagtttatagttatataaaacacaattgaatgccagtcgaccttaccatctgtaaaaatgaaaactggggcaaatatgtcacgaaggaatccttgcaaatttgaaattcgaggtcattgcttaaatggtaagaggtgtcattttagtcataattattttgaatggccaccccatgcactgcttgtaagacaaaactttatgttaaacagaatacttaagtctatggataaaagtatagataccttatcagaaataagtggagctgcagagttggacagaacagaagagtatgctcttggtgtagttggagtgctagagagttatataggatcaataaacaatataactaaacaatcagcatgtgttgccatgagcaaactcctcactgaactcaatagtgatgatatcaaaaagctgagggacaatgaagagctaaattcacccaagataagagtgtacaatactgtcatatcatatattgaaagcaacaggaaaaacaataaacaaactatccatctgttaaaaagattgccagcagacgtattgaagaaaaccatcaaaaacacattggatatccataagagcataaccatcaacaacccaaaagaatcaactgttagtgatacaaatgaccatgccaaaaataatgatactacctgacaaatatccttgtagtataacttccatactaataacaagtagatgtagagttactatgtataatcaaaagaacacactatatttcaatcaaaacaacccaaataaccatatgtactcaccgaatcaaacattcaatgaaatccattggacctctcaagaattgattgacacaattcaaaattttctacaacatctaggtattattgaggatatatatacaatatatatattagtgtcataacactcaattctaacactcaccacatcgttacattattaattcaaacaattcaagttgtgggacaaaatggatcccattattaatggaaattctgctaatgtttatctaaccgatagttatttaaaaggtgttatctctttctcagagtgtaatgctttaggaagttacatattcaatggtccttatctcaaaaatgattataccaacttaattagtagacaaaatccattaatagaacacatgaatctaaagaaactaaatataacacagtccttaatatctaagtatcataaaggtgaaataaaattagaagaacctacttattttcagtcattacttatgacatacaagagtatgacctcgtcagaacagattgctaccactaatttacttaaaaagataataagaagagctatagaaataagtgatgtcaaagtctatgctatattgaataaactagggcttaaagaaaaggacaagattaaatccaacaatggacaagatgaagacaactcagttattacgaccataatcaaagatgatatactttcagctgttaaagataatcaatctcatcttaaagcagacaaaaatcactctacaaaacaaaaagacacaatcaaaacaacactcttgaagaaattgatgtgttcaatgcaacatcctccatcatggttaatacattggtttaacttatacacaaaattaaacaacatattaacacagtatcgatcaaatgaggtaaaaaaccatgggtttacattgatagataatcaaactcttagtggatttcaatttattttgaaccaatatggttgtatagtttatcataaggaactcaaaagaattactgtgacaacctataatcaattcttgacatggaaagatattagccttagtagattaaatgtttgtttaattacatggattagtaactgcttgaacacattaaataaaagcttaggcttaagatgcggattcaataatgttatcttgacacaactattcctttatggagattgtatactaaagctatttcacaatgaggggttctacataataaaagaggtagagggatttattatgtctctaattttaaatataacagaagaagatcaattcagaaaacgattttataatagtatgctcaacaacatcacagatgctgctaataaagctcagaaaaatctgctatcaagagtatgtcatacattattagataagacagtgtccgataatataataaatggcagatggataattctattaagtaagttccttaaattaattaagcttgcaggtgacaataaccttaacaatctgagtgaactatattttttgttcagaatatttggacacccaatggtagatgaaagacaagccatggatgctgttaaaattaattgcaatgagaccaaattttacttgttaagcagtctgagtatgttaagaggtgcctttatatatagaattataaaagggtttgtaaataattacaacagatggcctactttaagaaatgctattgttttacccttaagatggttaacttactataaactaaacacttatccttctttgttggaacttacagaaagagatttgattgtgttatcaggactacgtttctatcgtgagtttcggttgcctaaaaaagtggatcttgaaatgattataaatgataaagctatatcacctcctaaaaatttgatatggactagtttccctagaaattacatgccatcacacatacaaaactatatagaacatgaaaaattaaaattttccgagagtgataaatcaagaagagtattagagtattatttaagagataacaaattcaatgaatgtgatttatacaactgtgtagttaatcaaagttatctcaacaaccctaatcatgtggtatcattgacaggcaaagaaagagaactcagtgtaggtagaatgtttgcaatgcaaccgggaatgttcagacaggttcaaatattggcagagaaaatgatagctgaaaacattttacaattctttcctgaaagtcttacaagatatggtgatctagaactacaaaaaatattagaattgaaagcaggaataagtaacaaatcaaatcgctacaatgataattacaacaattacattagtaagtgctctatcatcacagatctcagcaaattcaatcaagcatttcgatatgaaacgtcatgtatttgtagtgatgtgctggatgaactgcatggtgtacaatctctattttcctggttacatttaactattcctcatgtcacaataatatgcacatataggcatgcacccccctatataggagatcatattgtagatcttaacaatgtagatgaacaaagtggattatatagatatcacatgggtggcatcgaagggtggtgtcaaaaactgtggaccatagaagctatatcactattggatctaatatctctcaaagggaaattctcaattactgctttaattaatggtgacaatcaatcaatagatataagcaaaccaatcagactcatggaaggtcaaactcatgctcaagcagattatttgctagcattaaatagccttaaattactgtataaagagtatgcaggcataggccacaaattaaaaggaactgagacttatatatcacgagatatgcaatttatgagtaaaacaattcaacataacggtgtatattacccagctagtataaagaaagtcctaagagtgggaccgtggataaacactatacttgatgatttcaaagtgagtctagaatctataggtagtttgacacaagaattagaatatagaggtgaaagtctattatgcagtttaatatttagaaatgtatggttatataatcagattgctctacaattaaaaaatcatgcattatgtaacaataaactatatttggacatattaaaggttctgaaacacttaaaaaccttttttaatcttgataatattgatacagcattaacattgtatatgaatttacccatgttatttggtggtggtgatcccaacttgttatatcgaagtttctatagaagaactcctgacttcctcacagaggctatagttcactctgtgttcatacttagttattatacaaaccatgacttaaaagataaacttcaagatctgtcagatgatagattgaataagttcttaacatgcataatcacgtttgacaaaaaccctaatgctgaattcgtaacattgatgagagatcctcaagctttagggtctgagagacaagctaaaattactagcgaaatcaatagactggcagttacagaggttttgagtacagctccaaacaaaatattctccaaaagtgcacaacattatactactacagagatagatctaaatgatattatgcaaaatatagaacctacatatcctcatgggctaagagttgtttatgaaagtttacccttttataaagcagagaaaatagtaaatcttatatcaggtacaaaatctataactaacatactggaaaaaacttctgccatagacttaacagatattgatagagccactgagatgatgaggaaaaacataactttgcttataaggatacttccattggattgtaacagagataaaagagagatattgagtatggaaaacctaagtattactgaattaagcaaatatgttagggaaagatcttggtctttatccaatatagttggtgttacatcacccagtatcatgtatacaatggacatcaaatatactacaagcactatatctagtggcataattatagagaaatataatgttaacagtttaacacgtggtgagagaggacccactaaaccatgggttggttcatctacacaagagaaaaaaacaatgccagtttataatagacaagtcttaaccaaaaaacagagagatcaaatagatctattagcaaaattggattgggtgtatgcatctatagataacaaggatgaattcatggaagaactcagcataggaacccttgggttaacatatgaaaaggccaagaaattatttccacaatatttaagtgtcaattatttgcatcgccttacagtcagtagtagaccatgtgaattccctgcatcaataccagcttatagaacaacaaattatcactttgacactagccctattaatcgcatattaacagaaaagtatggtgatgaagatattgacatagtattccaaaactgtataagctttggccttagtttaatgtcagtagtagaacaatttactaatgtatgtcctaacagaattattctcatacctaagcttaatgagatacatttgatgaaacctcccatattcacaggtgatgttgatattcacaagttaaaacaagtgatacaaaaacagcatatgtttttaccagacaaaataagtttgactcaatatgtggaattattcttaagtaataaaacactcaaatctggatctcatgttaattctaatttaatattggcacataaaatatctgactattttcataatacttacattttaagtactaatttagctggacattggattctgattatacaacttatgaaagattctaaaggtatttttgaaaaagattggggagagggatatataactgatcatatgtttattaatttgaaagttttcttcaatgcttataagacctatctcttgtgttttcataaaggttatggcaaagcaaagctggagtgtgatatgaacacttcagatcttctatgtgtattggaattaatagacagtagttattggaagtctatgtctaaggtatttttagaacaaaaagttatcaaatacattcttagccaagatgcaagtttacatagagtaaaaggatgtcatagcttcaaattatggtttcttaaacgtcttaatgtagcagaattcacagtttgcccttgggttgttaacatagattatcatccaacacatatgaaagcaatattaacttatatagatcttgttagaatgggattgataaatatagatagaatacacattaaaaataaacacaaattcaatgatgaattttatacttctaatctcttctacattaattataacttctcagataatactcatctattaactaaacatataaggattgctaattctgaattagaaaataattacaacaaattatatcatcctacaccagaaaccctagagaatatactagccaatccgattaaaagtaatgacaaaaagacactgaatgactattgtataggtaaaaatgttgactcaataatgttaccattgttatctaataagaagcttattaaatcgtctgcaatgattagaaccaattacagcaaacaagatttgtataatttattccctatggttgtgattgatagaattatagatcattcaggcaatacagccaaatccaaccaactttacactactacttcccaccaaatatctttagtgcacaatagcacatcactttactgcatgcttccttggcatcatattaatagattcaattttgtatttagttctacaggttgtaaaattagtatagagtatattttaaaagatcttaaaattaaagatcccaattgtatagcattcataggtgaaggagcagggaatttattattgcgtacagtagtggaacttcatcctgacataagatatatttacagaagtctgaaagattgcaatgatcatagtttacctattgagtttttaaggctgtacaatggacatatcaacattgattatggtgaaaatttgaccattcctgctacagatgcaaccaacaacattcattggtcttatttacatataaagtttgctgaacctatcagtctttttgtctgtgatgccgaattgtctgtaacagtcaactggagtaaaattataatagaatggagcaagcatgtaagaaagtgcaagtactgttcctcagttaataaatgtatgttaatagtaaaatatcatgctcaagatgatattgatttcaaattagacaatataactatattaaaaacttatgtatgcttaggcagtaagttaaagggatcggaggtttacttagtccttacaataggtcctgcgaatatattcccagtatttaatgtagtacaaaatgctaaattgatactatcaagaaccaaaaatttcatcatgcctaagaaagctgataaagagtctattgatgcaaatattaaaagtttgataccctttctttgttaccctataacaaaaaaaggaattaatactgcattgtcaaaactaaagagtgttgttagtggagatatactatcatattctatagctggacgtaatgaagttttcagcaataaacttataaatcataagcatatgaacatcttaaaatggttcaatcatgttttaaatttcagatcaacagaactaaactataaccatttatatatggtagaatctacatatccttacctaagtgaattgttaaacagcttgacaaccaatgaacttaaaaaactgattaaaatcacaggtagtctgttatacaactttcataatgaataatgaataaagatcttataataaaaattcccatagctatacactaacactgtattcaattatagttattaaaaattaaaaatcgtacgattttttaaataacttttagtgaactaatcctaaagttatcattttaatcttggaggaataaatttaaaccctaatctaattggtttatatgtgtattaactaaattacgagatattagtttttgacactttttttctcgt

SEQ ID NO: 101 - DNA, 15935 bp, Artificial Sequence
  Description of Artificial Sequence: Synthetic polynucleotide
acgcgaaaaaatgcgtacaacaaacttgcataaaccaaaaaaatggggcaaataagaatttgataagtaccacttaaatttaactcccttgcttagcgatgggttcgaattcgctatcgatgataaaagtacgtctacaaaatctatttgataatgatgaagtagcgctactaaaaataacgtgttatacggataaactaatacatctaacgaatgcgctagcgaaagcggtaatacatacgataaaactaaatggtatagtatttgtacatgtaataacgtcgtcggatatatgtccgaataataatatagtagtaaaatcgaattttacgacgatgccggtactacaaaatggtggttatatatgggaaatgatggaactaacgcattgttcgcaaccgaatggtctactagatgataattgtgaaataaaattttcgaaaaaactatcggattcgacgatgacgaattatatgaatcaactatcggaactactaggttttgatctaaatccgtaaattataattaatatcaactagcaaatcaatgtcactaacaccattagttaatataaaacttaacagaagacaaaaatggggcaaataaatcaattcagccaacccaaccatggatacgacgcataatgataatacgccgcaacgtctaatgataacggatatgcgtccgctatcgctagaaacgataataacgtcgctaacgcgtgatataataacgcataaatttatatatctaataaatcatgaatgtatagtacgtaaactagatgaacgtcaagcgacgtttacgtttctagtaaattatgaaatgaaactactacataaagtaggttcgacgaaatataaaaaatatacggaatataatacgaaatatggtacgtttccgatgccgatatttataaatcatgatggttttctagaatgtataggtataaaaccgacgaaacatacgccgataatatataaatatgatctaaatccgtaaatttcaacacaatattcacacaatctaaaacaacaactctatgcataactatactccatagtccagatggagcctgaaaattatagtaatttaaaattaaggagagatataagatagaagatggggcaaatacaaagatggctcttagcaaagtcaagttgaatgatacactcaacaaagatcaacttctgtcatccagcaaatacaccatccaacggagcacaggagatagtattgatactcctaattatgatgtgcagaaacacatcaataagttatgtggcatgttattaatcacagaagatgctaatcataaattcactgggttaataggtatgttatatgcgatgtctaggttaggaagagaagacaccataaaaatactcagagatgcgggatatcatgtaaaagcaaatggagtagatgtaacaacacatcgtcaagacattaatggaaaagaaatgaaatttgaagtgttaacattggcaagcttaacaactgaaattcaaatcaacattgagatagaatctagaaaatcctacaaaaaaatgctaaaagaaatgggagaggtagctccagaatacaggcatgactctcctgattgtgggatgataatattatgtatagcagcattagtaataactaaattagcagcaggggacagatctggtcttacagccgtgattaggagagctaataatgtcctaaaaaatgaaatgaaacgttacaaaggcttactacccaaggacatagccaacagcttctatgaagtgtttgaaaaacatccccactttatagatgtttttgttcattttggtatagcacaatcttctaccagaggtggcagtagagttgaagggatttttgcaggattgtttatgaatgcctatggtgcagggcaagtgatgttacggtggggagtcttagcaaaatcagttaaaaatattatgttaggacatgctagtgtgcaagcagaaatggaacaagttgttgaggtttatgaatatgcccaaaaattgggtggtgaagcaggattctaccatatattgaacaacccaaaagcatcattattatctttgactcaatttcctcacttctccagtgtagtattaggcaatgctgctggcctaggcataatgggagagtacagaggtacaccgaggaatcaagatctatatgatgcagcaaaggcatatgctgaacaactcaaagaaaatggtgtgattaactacagtgtactagacttgacagcagaagaactagaggctatcaaacatcagcttaatccaaaagataatgatgtagagctttgagttaataaaaaatggggcaaataaatcatcatggaaaagtttgctcctgaattccatggagaagatgcaaacaacagggctactaaattcctagaatcaataaagggcaaattcacatcacccaaagatcccaagaaaaaagatagtatcatatctgtcaactcaatagatatagaagtaaccaaagaaagccctataacatcaaattcaactattatcaacccaacaaatgagacagatgatactgcagggaacaagcccaattatcaaagaaaacctctagtaagtttcaaagaagaccctacaccaagtgataatcccttttctaaactatacaaagaaaccatagaaacatttgataacaatgaagaagaatccagctattcatacgaagaaataaatgatcagacaaacgataatataacagcaagattagataggattgatgaaaaattaagtgaaatactaggaatgcttcacacattagtagtggcaagtgcaggacctacatctgctcgggatggtataagagatgccatgattggtttaagagaagaaatgatagaaaaaatcagaactgaagcattaatgaccaatgacagattagaagctatggcaagactcaggaatgaggaaagtgaaaagatggcaaaagacacatcagatgaagtgtctctcaatccaacatcagagaaattgaacaacctattggaagggaatgatagtgacaatgatctatcacttgaagatttctgattagttaccactcttcacatcaacacacaataccaacagaagaccaacaaactaaccaacccaatcatccaaccaaacatccatccgccaatcagccaaacagccaacaaaacaaccagccaatccaaaactaaccacccggaaaaaatctataatatagttacaaaaaaaggaaagggtggggcaaatatggaaacatacgtgaacaagcttcacgaaggctccacatacacagctgctgttcaatacaatgtcttagaaaaagacgatgaccctgcatcacttacaatatgggtgcccatgttccaatcatctatgccagcagatttacttataaaagaactagctaatgtcaacatactagtgaaacaaatatccacacccaagggaccttcactaagagtcatgataaactcaagaagtgcagtgctagcacaaatgcccagcaaatttaccatatgcgctaatgtgtccttggatgaaagaagcaaactagcatatgatgtaaccacaccctgtgaaatcaaggcatgtagtctaacatgcctaaaatcaaaaaatatgttgactacagttaaagatctcactatgaagacactcaaccctacacatgatattattgctttatgtgaatttgaaaacatagtaacatcaaaaaaagtcataataccaacatacctaagatccatcagtgtcagaaataaagatctgaacacacttgaaaatataacaaccactgaattcaaaaatgctatcacaaatgcaaaaatcatcccttactcaggattactattagtcatcacagtgactgacaacaaaggagcattcaaatacataaagccacaaagtcaattcatagtagatcttggagcttacctagaaaaagaaagtatatattatgttaccacaaattggaagcacacagctacacgatttgcaatcaaacccatggaagattaacctttttcctctacatcagtgtgttaattcatacaaactttctacctacattcttcacttcaccatcacaatcacaaacactctgtggttcaaccaatcaaacaaaacttatctgaagtcccagatcatcccaagtcattgtttatcagatctagtactcaaataagttaataaaaaatatacacatggacgtccatggggcaaatgcaaacatgtttgtttttcttgttttattgccactagtctctagtcagtgtgttaatcttacaaccagaactcaattaccccctgcatacactaattctttcacacgtggtgtttattaccctgacaaagttttcagatcctcagttttacattcaactcaggacttgttcttacctttcttttccaatgttacttggttccatgctatacatgtctctgggaccaatggtactaagaggtttgataaccctgtcctaccatttaatgatggtgtttattttgcttccactgagaagtctaacataataagaggctggatttttggtactactttagattcgaagacccagtccctacttattgttaataacgctactaatgttgttattaaagtctgtgaatttcaattttgtaatgatccatttttgggtgtttattaccacaaaaacaacaaaagttggatggaaagtgagttcagagtttattctagtgcgaataattgcacttttgaatatgtctctcagccttttcttatggaccttgaaggaaaacagggtaatttcaaaaatcttagggaatttgtgtttaagaatattgatggttattttaaaatatattctaagcacacgcctattaatttagtgcgtgatctccctcagggtttttcggctttagaaccattggtagatttgccaataggtattaacatcactaggtttcaaactttacttgctttacatagaagttatttgactcctggtgattcttcttcaggttggacagctggtgctgcagcttattatgtgggttatcttcaacctaggacttttctattaaaatataatgaaaatggaaccattacagatgctgtagactgtgcacttgaccctctctcagaaacaaagtgtacgttgaaatccttcactgtagaaaaaggaatctatcaaacttctaactttagagtccaaccaacagaatctattgttagatttcctaatattacaaacttgtgcccttttggtgaagtttttaacgccaccagatttgcatctgtttatgcttggaacaggaagagaatcagcaactgtgttgctgattattctgtcctatataattccgcatcattttccacttttaagtgttatggagtgtctcctactaaattaaatgatctctgctttactaatgtctatgcagattcatttgtaattagaggtgatgaagtcagacaaatcgctccagggcaaactggaaagattgctgattataattataaattaccagatgattttacaggctgcgttatagcttggaattctaacaatcttgattctaaggttggtggtaattataattacctgtatagattgtttaggaagtctaatctcaaaccttttgagagagatatttcaactgaaatctatcaggccggtagcacaccttgtaatggtgttgaaggttttaattgttactttcctttacaatcatatggtttccaacccactaatggtgttggttaccaaccatacagagtagtagtactttcttttgaacttctacatgcaccagcaactgtttgtggacctaaaaagtctactaatttggttaaaaacaaatgtgtcaatttcaacttcaatggtttaacaggcacaggtgttcttactgagtctaacaaaaagtttctgcctttccaacaatttggcagagacattgctgacactactgatgctgtccgtgatccacagacacttgagattcttgacattacaccatgttcttttggtggtgtcagtgttataacaccaggaacaaatacttctaaccaggttgctgttctttatcaggatgttaactgcacagaagtccctgttgctattcatgcagatcaacttactcctacttggcgtgtttattctacaggttctaatgtttttcaaacacgtgcaggctgtttaataggggctgaacatgtcaacaactcatatgagtgtgacatacccattggtgcaggtatatgcgctagttatcagactcagactaattctcctcggcgggcacgtagtgtagctagtcaatccatcattgcctacactatgtcacttggtgcagaaaattcagttgcttactctaataactctattgccatacccacaaattttactattagtgttaccacagaaattctaccagtgtctatgaccaagacatcagtagattgtacaatgtacatttgtggtgattcaactgaatgcagcaatcttttgttgcaatatggcagtttttgtacacaattaaaccgtgctttaactggaatagctgttgaacaagacaaaaacacccaagaagtttttgcacaagtcaaacaaatttacaaaacaccaccaattaaagattttggtggttttaatttttcacaaatattaccagatccatcaaaaccaagcaagaggtcatttattgaagatctacttttcaacaaagtgacacttgcagatgctggcttcatcaaacaatatggtgattgccttggtgatattgctgctagagacctcatttgtgcacaaaagtttaacggccttactgttttgccacctttgctcacagatgaaatgattgctcaatacacttctgcactgttagcgggtacaatcacttctggttggacctttggtgcaggtgctgcattacaaataccatttgctatgcaaatggcttataggtttaatggtattggagttacacagaatgttctctatgagaaccaaaaattgattgccaaccaatttaatagtgctattggcaaaattcaagactcactttcttccacagcaagtgcacttggaaaacttcaagatgtggtcaaccaaaatgcacaagctttaaacacgcttgttaaacaacttagctccaattttggtgcaatttcaagtgttttaaatgatatcctttcacgtcttgacaaagttgaggctgaagtgcaaattgataggttgatcacaggcagacttcaaagtttgcagacatatgtgactcaacaattaattagagctgcagaaatcagagcttctgctaatcttgctgctactaaaatgtcagagtgtgtacttggacaatcaaaaagagttgatttttgtggaaagggctatcatcttatgtccttccctcagtcagcacctcatggtgtagtcttcttgcatgtgacttatgtccctgcacaagaaaagaacttcacaactgctcctgccatttgtcatgatggaaaagcacactttcctcgtgaaggtgtctttgtttcaaatggcacacactggtttgtaacacaaaggaatttttatgaaccacaaatcattactacagacaacacatttgtgtctggtaactgtgatgttgtaataggaattgtcaacaacacagtttatgatcctttgcaacctgaattagactcattcaaggaggagttagataaatattttaagaatcatacatcaccagatgttgatttaggtgacatctctggcattaatgcttcagttgtaaacattcaaaaagaaattgaccgcctcaatgaggttgccaagaatttaaatgaatctctcatcgatctccaagaacttggaaagtatgagcagtatataaaatggccatggtacatttggctaggttttatagctggcttgattgccatagtaatggtgacaattatgctttgctgtatgaccagttgctgtagttgtctcaagggctgttgttcttgtggatcctgctgcggactgctcctatactgtaaggccagaagcacaccaatcacactaagcaaggatcaactgagtggtataaataatattgcatttagtaactaaataaaaatagcacctaatcatgttcttacaatggtttactatctgctcatagacaacccatctatcattggattttcttaaaatctgaacttcatcgaaactcttatctataaaccatctcacttacactatttaagtagattcctagtttatagttatataaaacacaattgaatgccagtcgaccttaccatctgtaaaaatgaaaactggggcaaatatgtcacgaaggaatccttgcaaatttgaaattcgaggtcattgcttaaatggtaagaggtgtcattttagtcataattattttgaatggccaccccatgcactgcttgtaagacaaaactttatgttaaacagaatacttaagtctatggataaaagtatagataccttatcagaaataagtggagctgcagagttggacagaacagaagagtatgctcttggtgtagttggagtgctagagagttatataggatcaataaacaatataactaaacaatcagcatgtgttgccatgagcaaactcctcactgaactcaatagtgatgatatcaaaaagctgagggacaatgaagagctaaattcacccaagataagagtgtacaatactgtcatatcatatattgaaagcaacaggaaaaacaataaacaaactatccatctgttaaaaagattgccagcagacgtattgaagaaaaccatcaaaaacacattggatatccataagagcataaccatcaacaacccaaaagaatcaactgttagtgatacaaatgaccatgccaaaaataatgatactacctgacaaatatccttgtagtataacttccatactaataacaagtagatgtagagttactatgtataatcaaaagaacacactatatttcaatcaaaacaacccaaataaccatatgtactcaccgaatcaaacattcaatgaaatccattggacctctcaagaattgattgacacaattcaaaattttctacaacatctaggtattattgaggatatatatacaatatatatattagtgtcataacactcaattctaacactcaccacatcgttacattattaattcaaacaattcaagttgtgggacaaaatggatcccattattaatggaaattctgctaatgtttatctaaccgatagttatttaaaaggtgttatctctttctcagagtgtaatgctttaggaagttacatattcaatggtccttatctcaaaaatgattataccaacttaattagtagacaaaatccattaatagaacacatgaatctaaagaaactaaatataacacagtccttaatatctaagtatcataaaggtgaaataaaattagaagaacctacttattttcagtcattacttatgacatacaagagtatgacctcgtcagaacagattgctaccactaatttacttaaaaagataataagaagagctatagaaataagtgatgtcaaagtctatgctatattgaataaactagggcttaaagaaaaggacaagattaaatccaacaatggacaagatgaagacaactcagttattacgaccataatcaaagatgatatactttcagctgttaaagataatcaatctcatcttaaagcagacaaaaatcactctacaaaacaaaaagacacaatcaaaacaacactcttgaagaaattgatgtgttcaatgcaacatcctccatcatggttaatacattggtttaacttatacacaaaattaaacaacatattaacacagtatcgatcaaatgaggtaaaaaaccatgggtttacattgatagataatcaaactcttagtggatttcaatttattttgaaccaatatggttgtatagtttatcataaggaactcaaaagaattactgtgacaacctataatcaattcttgacatggaaagatattagccttagtagattaaatgtttgtttaattacatggattagtaactgcttgaacacattaaataaaagcttaggcttaagatgcggattcaataatgttatcttgacacaactattcctttatggagattgtatactaaagctatttcacaatgaggggttctacataataaaagaggtagagggatttattatgtctctaattttaaatataacagaagaagatcaattcagaaaacgattttataatagtatgctcaacaacatcacagatgctgctaataaagctcagaaaaatctgctatcaagagtatgtcatacattattagataagacagtgtccgataatataataaatggcagatggataattctattaagtaagttccttaaattaattaagcttgcaggtgacaataaccttaacaatctgagtgaactatattttttgttcagaatatttggacacccaatggtagatgaaagacaagccatggatgctgttaaaattaattgcaatgagaccaaattttacttgttaagcagtctgagtatgttaagaggtgcctttatatatagaattataaaagggtttgtaaataattacaacagatggcctactttaagaaatgctattgttttacccttaagatggttaacttactataaactaaacacttatccttctttgttggaacttacagaaagagatttgattgtgttatcaggactacgtttctatcgtgagtttcggttgcctaaaaaagtggatcttgaaatgattataaatgataaagctatatcacctcctaaaaatttgatatggactagtttccctagaaattacatgccatcacacatacaaaactatatagaacatgaaaaattaaaattttccgagagtgataaatcaagaagagtattagagtattatttaagagataacaaattcaatgaatgtgatttatacaactgtgtagttaatcaaagttatctcaacaaccctaatcatgtggtatcattgacaggcaaagaaagagaactcagtgtaggtagaatgtttgcaatgcaaccgggaatgttcagacaggttcaaatattggcagagaaaatgatagctgaaaacattttacaattctttcctgaaagtcttacaagatatggtgatctagaactacaaaaaatattagaattgaaagcaggaataagtaacaaatcaaatcgctacaatgataattacaacaattacattagtaagtgctctatcatcacagatctcagcaaattcaatcaagcatttcgatatgaaacgtcatgtatttgtagtgatgtgctggatgaactgcatggtgtacaatctctattttcctggttacatttaactattcctcatgtcacaataatatgcacatataggcatgcacccccctatataggagatcatattgtagatcttaacaatgtagatgaacaaagtggattatatagatatcacatgggtggcatcgaagggtggtgtcaaaaactgtggaccatagaagctatatcactattggatctaatatctctcaaagggaaattctcaattactgctttaattaatggtgacaatcaatcaatagatataagcaaaccaatcagactcatggaaggtcaaactcatgctcaagcagattatttgctagcattaaatagccttaaattactgtataaagagtatgcaggcataggccacaaattaaaaggaactgagacttatatatcacgagatatgcaatttatgagtaaaacaattcaacataacggtgtatattacccagctagtataaagaaagtcctaagagtgggaccgtggataaacactatacttgatgatttcaaagtgagtctagaatctataggtagtttgacacaagaattagaatatagaggtgaaagtctattatgcagtttaatatttagaaatgtatggttatataatcagattgctctacaattaaaaaatcatgcattatgtaacaataaactatatttggacatattaaaggttctgaaacacttaaaaaccttttttaatcttgataatattgatacagcattaacattgtatatgaatttacccatgttatttggtggtggtgatcccaacttgttatatcgaagtttctatagaagaactcctgacttcctcacagaggctatagttcactctgtgttcatacttagttattatacaaaccatgacttaaaagataaacttcaagatctgtcagatgatagattgaataagttcttaacatgcataatcacgtttgacaaaaaccctaatgctgaattcgtaacattgatgagagatcctcaagctttagggtctgagagacaagctaaaattactagcgaaatcaatagactggcagttacagaggttttgagtacagctccaaacaaaatattctccaaaagtgcacaacattatactactacagagatagatctaaatgatattatgcaaaatatagaacctacatatcctcatgggctaagagttgtttatgaaagtttacccttttataaagcagagaaaatagtaaatcttatatcaggtacaaaatctataactaacatactggaaaaaacttctgccatagacttaacagatattgatagagccactgagatgatgaggaaaaacataactttgcttataaggatacttccattggattgtaacagagataaaagagagatattgagtatggaaaacctaagtattactgaattaagcaaatatgttagggaaagatcttggtctttatccaatatagttggtgttacatcacccagtatcatgtatacaatggacatcaaatatactacaagcactatatctagtggcataattatagagaaatataatgttaacagtttaacacgtggtgagagaggacccactaaaccatgggttggttcatctacacaagagaaaaaaacaatgccagtttataatagacaagtcttaaccaaaaaacagagagatcaaatagatctattagcaaaattggattgggtgtatgcatctatagataacaaggatgaattcatggaagaactcagcataggaacccttgggttaacatatgaaaaggccaagaaattatttccacaatatttaagtgtcaattatttgcatcgccttacagtcagtagtagaccatgtgaattccctgcatcaataccagcttatagaacaacaaattatcactttgacactagccctattaatcgcatattaacagaaaagtatggtgatgaagatattgacatagtattccaaaactgtataagctttggccttagtttaatgtcagtagtagaacaatttactaatgtatgtcctaacagaattattctcatacctaagcttaatgagatacatttgatgaaacctcccatattcacaggtgatgttgatattcacaagttaaaacaagtgatacaaaaacagcatatgtttttaccagacaaaataagtttgactcaatatgtggaattattcttaagtaataaaacactcaaatctggatctcatgttaattctaatttaatattggcacataaaatatctgactattttcataatacttacattttaagtactaatttagctggacattggattctgattatacaacttatgaaagattctaaaggtatttttgaaaaagattggggagagggatatataactgatcatatgtttattaatttgaaagttttcttcaatgcttataagacctatctcttgtgttttcataaaggttatggcaaagcaaagctggagtgtgatatgaacacttcagatcttctatgtgtattggaattaatagacagtagttattggaagtctatgtctaaggtatttttagaacaaaaagttatcaaatacattcttagccaagatgcaagtttacatagagtaaaaggatgtcatagcttcaaattatggtttcttaaacgtcttaatgtagcagaattcacagtttgcccttgggttgttaacatagattatcatccaacacatatgaaagcaatattaacttatatagatcttgttagaatgggattgataaatatagatagaatacacattaaaaataaacacaaattcaatgatgaattttatacttctaatctcttctacattaattataacttctcagataatactcatctattaactaaacatataaggattgctaattctgaattagaaaataattacaacaaattatatcatcctacaccagaaaccctagagaatatactagccaatccgattaaaagtaatgacaaaaagacactgaatgactattgtataggtaaaaatgttgactcaataatgttaccattgttatctaataagaagcttattaaatcgtctgcaatgattagaaccaattacagcaaacaagatttgtataatttattccctatggttgtgattgatagaattatagatcattcaggcaatacagccaaatccaaccaactttacactactacttcccaccaaatatctttagtgcacaatagcacatcactttactgcatgcttccttggcatcatattaatagattcaattttgtatttagttctacaggttgtaaaattagtatagagtatattttaaaagatcttaaaattaaagatcccaattgtatagcattcataggtgaaggagcagggaatttattattgcgtacagtagtggaacttcatcctgacataagatatatttacagaagtctgaaagattgcaatgatcatagtttacctattgagtttttaaggctgtacaatggacatatcaacattgattatggtgaaaatttgaccattcctgctacagatgcaaccaacaacattcattggtcttatttacatataaagtttgctgaacctatcagtctttttgtctgtgatgccgaattgtctgtaacagtcaactggagtaaaattataatagaatggagcaagcatgtaagaaagtgcaagtactgttcctcagttaataaatgtatgttaatagtaaaatatcatgctcaagatgatattgatttcaaattagacaatataactatattaaaaacttatgtatgcttaggcagtaagttaaagggatcggaggtttacttagtccttacaataggtcctgcgaatatattcccagtatttaatgtagtacaaaatgctaaattgatactatcaagaaccaaaaatttcatcatgcctaagaaagctgataaagagtctattgatgcaaatattaaaagtttgataccctttctttgttaccctataacaaaaaaaggaattaatactgcattgtcaaaactaaagagtgttgttagtggagatatactatcatattctatagctggacgtaatgaagttttcagcaataaacttataaatcataagcatatgaacatcttaaaatggttcaatcatgttttaaatttcagatcaacagaactaaactataaccatttatatatggtagaatctacatatccttacctaagtgaattgttaaacagcttgacaaccaatgaacttaaaaaactgattaaaatcacaggtagtctgttatacaactttcataatgaataatgaataaagatcttataataaaaattcccatagctatacactaacactgtattcaattatagttattaaaaattaaaaatcgtacgattttttaaataacttttagtgaactaatcctaaagttatcattttaatcttggaggaataaatttaaaccctaatctaattggtttatatgtgtattaactaaattacgagatattagtttttgacactttttttctcgt

SEQ ID NO: 102 - DNA, 23434 bp, Artificial Sequence
  Description of Artificial Sequence: Synthetic polynucleotide
aaacggatccttcgaaacgaaattaatacgactcactatagggaagtttttcgcgtctgatgaggccgttaggccgaaactcctctccggagtcacgcgaaaaaatgcgtacaacaaacttgcataaaccaaaaaaatggggcaaataagaatttgataagtaccacttaaatttaactcccttgcttagcgatggtgagcgagctgattaaggagaacatgcacatgaagctgtacatggagggcaccgtgaacaaccaccacttcaagtgcacatccgagggcgaaggcaagccctacgagggcacccagaccatgagaatcaaggcggtcgagggcggccctctccccttcgccttcgacatcctggctaccagcttcatgtacggcagcaaaaccttcatcaaccacacccagggcatccccgacttctttaagcagtccttccccgagggcttcacatgggagagagtcaccacatacgaagacgggggcgtgctgaccgctacccaggacaccagcctccaggacggctgcctcatctacaacgtcaagatcagaggggtgaacttcccatccaacggccctgtgatgcagaagaaaacactcggctgggaggcctccaccgagaccctgtaccccgctgacggcggcctggaaggcagagccgacatggccctgaagctcgtgggcgggggccacctgatctgcaacttgaagaccacatacagatccaagaaacccgctaagaacctcaagatgcccggcgtctactatgtggacagaagactggaaagaatcaaggaggccgacaaagagacctacgtcgagcagcacgaggtggctgtggccagatactgcgacctccctagcaaactggggcacagatgagtattcaattatagttattaaaaacttaacagaagacaaaaatggggcaaataagaatttgataagtaccacttaaatttaactcccttgcttagcgatgggttcgaattcgctatcgatgataaaagtacgtctacaaaatctatttgataatgatgaagtagcgctactaaaaataacgtgttatacggataaactaatacatctaacgaatgcgctagcgaaagcggtaatacatacgataaaactaaatggtatagtatttgtacatgtaataacgtcgtcggatatatgtccgaataataatatagtagtaaaatcgaattttacgacgatgccggtactacaaaatggtggttatatatgggaaatgatggaactaacgcattgttcgcaaccgaatggtctactagatgataattgtgaaataaaattttcgaaaaaactatcggattcgacgatgacgaattatatgaatcaactatcggaactactaggttttgatctaaatccgtaaattataattaatatcaactagcaaatcaatgtcactaacaccattagttaatataaaacttaacagaagacaaaaatggggcaaataaatcaattcagccaacccaaccatggatacgacgcataatgataatacgccgcaacgtctaatgataacggatatgcgtccgctatcgctagaaacgataataacgtcgctaacgcgtgatataataacgcataaatttatatatctaataaatcatgaatgtatagtacgtaaactagatgaacgtcaagcgacgtttacgtttctagtaaattatgaaatgaaactactacataaagtaggttcgacgaaatataaaaaatatacggaatataatacgaaatatggtacgtttccgatgccgatatttataaatcatgatggttttctagaatgtataggtataaaaccgacgaaacatacgccgataatatataaatatgatctaaatccgtaaatttcaacacaatattcacacaatctaaaacaacaactctatgcataactatactccatagtccagatggagcctgaaaattatagtaatttaaaattaaggagagatataagatagaagatggggcaaatacaaagatggctcttagcaaagtcaagttgaatgatacactcaacaaagatcaacttctgtcatccagcaaatacaccatccaacggagcacaggagatagtattgatactcctaattatgatgtgcagaaacacatcaataagttatgtggcatgttattaatcacagaagatgctaatcataaattcactgggttaataggtatgttatatgcgatgtctaggttaggaagagaagacaccataaaaatactcagagatgcgggatatcatgtaaaagcaaatggagtagatgtaacaacacatcgtcaagacattaatggaaaagaaatgaaatttgaagtgttaacattggcaagcttaacaactgaaattcaaatcaacattgagatagaatctagaaaatcctacaaaaaaatgctaaaagaaatgggagaggtagctccagaatacaggcatgactctcctgattgtgggatgataatattatgtatagcagcattagtaataactaaattagcagcaggggacagatctggtcttacagccgtgattaggagagctaataatgtcctaaaaaatgaaatgaaacgttacaaaggcttactacccaaggacatagccaacagcttctatgaagtgtttgaaaaacatccccactttatagatgtttttgttcattttggtatagcacaatcttctaccagaggtggcagtagagttgaagggatttttgcaggattgtttatgaatgcctatggtgcagggcaagtgatgttacggtggggagtcttagcaaaatcagttaaaaatattatgttaggacatgctagtgtgcaagcagaaatggaacaagttgttgaggtttatgaatatgcccaaaaattgggtggtgaagcaggattctaccatatattgaacaacccaaaagcatcattattatctttgactcaatttcctcacttctccagtgtagtattaggcaatgctgctggcctaggcataatgggagagtacagaggtacaccgaggaatcaagatctatatgatgcagcaaaggcatatgctgaacaactcaaagaaaatggtgtgattaactacagtgtactagacttgacagcagaagaactagaggctatcaaacatcagcttaatccaaaagataatgatgtagagctttgagttaataaaaaatggggcaaataaatcatcatggaaaagtttgctcctgaattccatggagaagatgcaaacaacagggctactaaattcctagaatcaataaagggcaaattcacatcacccaaagatcccaagaaaaaagatagtatcatatctgtcaactcaatagatatagaagtaaccaaagaaagccctataacatcaaattcaactattatcaacccaacaaatgagacagatgatactgcagggaacaagcccaattatcaaagaaaacctctagtaagtttcaaagaagaccctacaccaagtgataatcccttttctaaactatacaaagaaaccatagaaacatttgataacaatgaagaagaatccagctattcatacgaagaaataaatgatcagacaaacgataatataacagcaagattagataggattgatgaaaaattaagtgaaatactaggaatgcttcacacattagtagtggcaagtgcaggacctacatctgctcgggatggtataagagatgccatgattggtttaagagaagaaatgatagaaaaaatcagaactgaagcattaatgaccaatgacagattagaagctatggcaagactcaggaatgaggaaagtgaaaagatggcaaaagacacatcagatgaagtgtctctcaatccaacatcagagaaattgaacaacctattggaagggaatgatagtgacaatgatctatcacttgaagatttctgattagttaccactcttcacatcaacacacaataccaacagaagaccaacaaactaaccaacccaatcatccaaccaaacatccatccgccaatcagccaaacagccaacaaaacaaccagccaatccaaaactaaccacccggaaaaaatctataatatagttacaaaaaaaggaaagggtggggcaaatatggaaacatacgtgaacaagcttcacgaaggctccacatacacagctgctgttcaatacaatgtcttagaaaaagacgatgaccctgcatcacttacaatatgggtgcccatgttccaatcatctatgccagcagatttacttataaaagaactagctaatgtcaacatactagtgaaacaaatatccacacccaagggaccttcactaagagtcatgataaactcaagaagtgcagtgctagcacaaatgcccagcaaatttaccatatgcgctaatgtgtccttggatgaaagaagcaaactagcatatgatgtaaccacaccctgtgaaatcaaggcatgtagtctaacatgcctaaaatcaaaaaatatgttgactacagttaaagatctcactatgaagacactcaaccctacacatgatattattgctttatgtgaatttgaaaacatagtaacatcaaaaaaagtcataataccaacatacctaagatccatcagtgtcagaaataaagatctgaacacacttgaaaatataacaaccactgaattcaaaaatgctatcacaaatgcaaaaatcatcccttactcaggattactattagtcatcacagtgactgacaacaaaggagcattcaaatacataaagccacaaagtcaattcatagtagatcttggagcttacctagaaaaagaaagtatatattatgttaccacaaattggaagcacacagctacacgatttgcaatcaaacccatggaagattaacctttttcctctacatcagtgtgttaattcatacaaactttctacctacattcttcacttcaccatcacaatcacaaacactctgtggttcaaccaatcaaacaaaacttatctgaagtcccagatcatcccaagtcattgtttatcagatctagtactcaaataagttaataaaaaatatacacatggacgtccatggggcaaatgcaaacatgtttgtttttcttgttttattgccactagtctctagtcagtgtgttaatcttacaaccagaactcaattaccccctgcatacactaattctttcacacgtggtgtttattaccctgacaaagttttcagatcctcagttttacattcaactcaggacttgttcttacctttcttttccaatgttacttggttccatgctatacatgtctctgggaccaatggtactaagaggtttgataaccctgtcctaccatttaatgatggtgtttattttgcttccactgagaagtctaacataataagaggctggatttttggtactactttagattcgaagacccagtccctacttattgttaataacgctactaatgttgttattaaagtctgtgaatttcaattttgtaatgatccatttttgggtgtttattaccacaaaaacaacaaaagttggatggaaagtgagttcagagtttattctagtgcgaataattgcacttttgaatatgtctctcagccttttcttatggaccttgaaggaaaacagggtaatttcaaaaatcttagggaatttgtgtttaagaatattgatggttattttaaaatatattctaagcacacgcctattaatttagtgcgtgatctccctcagggtttttcggctttagaaccattggtagatttgccaataggtattaacatcactaggtttcaaactttacttgctttacatagaagttatttgactcctggtgattcttcttcaggttggacagctggtgctgcagcttattatgtgggttatcttcaacctaggacttttctattaaaatataatgaaaatggaaccattacagatgctgtagactgtgcacttgaccctctctcagaaacaaagtgtacgttgaaatccttcactgtagaaaaaggaatctatcaaacttctaactttagagtccaaccaacagaatctattgttagatttcctaatattacaaacttgtgcccttttggtgaagtttttaacgccaccagatttgcatctgtttatgcttggaacaggaagagaatcagcaactgtgttgctgattattctgtcctatataattccgcatcattttccacttttaagtgttatggagtgtctcctactaaattaaatgatctctgctttactaatgtctatgcagattcatttgtaattagaggtgatgaagtcagacaaatcgctccagggcaaactggaaagattgctgattataattataaattaccagatgattttacaggctgcgttatagcttggaattctaacaatcttgattctaaggttggtggtaattataattacctgtatagattgtttaggaagtctaatctcaaaccttttgagagagatatttcaactgaaatctatcaggccggtagcacaccttgtaatggtgttgaaggttttaattgttactttcctttacaatcatatggtttccaacccactaatggtgttggttaccaaccatacagagtagtagtactttcttttgaacttctacatgcaccagcaactgtttgtggacctaaaaagtctactaatttggttaaaaacaaatgtgtcaatttcaacttcaatggtttaacaggcacaggtgttcttactgagtctaacaaaaagtttctgcctttccaacaatttggcagagacattgctgacactactgatgctgtccgtgatccacagacacttgagattcttgacattacaccatgttcttttggtggtgtcagtgttataacaccaggaacaaatacttctaaccaggttgctgttctttatcaggatgttaactgcacagaagtccctgttgctattcatgcagatcaacttactcctacttggcgtgtttattctacaggttctaatgtttttcaaacacgtgcaggctgtttaataggggctgaacatgtcaacaactcatatgagtgtgacatacccattggtgcaggtatatgcgctagttatcagactcagactaattctcctcggcgggcacgtagtgtagctagtcaatccatcattgcctacactatgtcacttggtgcagaaaattcagttgcttactctaataactctattgccatacccacaaattttactattagtgttaccacagaaattctaccagtgtctatgaccaagacatcagtagattgtacaatgtacatttgtggtgattcaactgaatgcagcaatcttttgttgcaatatggcagtttttgtacacaattaaaccgtgctttaactggaatagctgttgaacaagacaaaaacacccaagaagtttttgcacaagtcaaacaaatttacaaaacaccaccaattaaagattttggtggttttaatttttcacaaatattaccagatccatcaaaaccaagcaagaggtcatttattgaagatctacttttcaacaaagtgacacttgcagatgctggcttcatcaaacaatatggtgattgccttggtgatattgctgctagagacctcatttgtgcacaaaagtttaacggccttactgttttgccacctttgctcacagatgaaatgattgctcaatacacttctgcactgttagcgggtacaatcacttctggttggacctttggtgcaggtgctgcattacaaataccatttgctatgcaaatggcttataggtttaatggtattggagttacacagaatgttctctatgagaaccaaaaattgattgccaaccaatttaatagtgctattggcaaaattcaagactcactttcttccacagcaagtgcacttggaaaacttcaagatgtggtcaaccaaaatgcacaagctttaaacacgcttgttaaacaacttagctccaattttggtgcaatttcaagtgttttaaatgatatcctttcacgtcttgacaaagttgaggctgaagtgcaaattgataggttgatcacaggcagacttcaaagtttgcagacatatgtgactcaacaattaattagagctgcagaaatcagagcttctgctaatcttgctgctactaaaatgtcagagtgtgtacttggacaatcaaaaagagttgatttttgtggaaagggctatcatcttatgtccttccctcagtcagcacctcatggtgtagtcttcttgcatgtgacttatgtccctgcacaagaaaagaacttcacaactgctcctgccatttgtcatgatggaaaagcacactttcctcgtgaaggtgtctttgtttcaaatggcacacactggtttgtaacacaaaggaatttttatgaaccacaaatcattactacagacaacacatttgtgtctggtaactgtgatgttgtaataggaattgtcaacaacacagtttatgatcctttgcaacctgaattagactcattcaaggaggagttagataaatattttaagaatcatacatcaccagatgttgatttaggtgacatctctggcattaatgcttcagttgtaaacattcaaaaagaaattgaccgcctcaatgaggttgccaagaatttaaatgaatctctcatcgatctccaagaacttggaaagtatgagcagtatataaaatggccatggtacatttggctaggttttatagctggcttgattgccatagtaatggtgacaattatgctttgctgtatgaccagttgctgtagttgtctcaagggctgttgttcttgtggatcctgctgcggactgctcctatactgtaaggccagaagcacaccaatcacactaagcaaggatcaactgagtggtataaataatattgcatttagtaactaaataaaaatagcacctaatcatgttcttacaatggtttactatctgctcatagacaacccatctatcattggattttcttaaaatctgaacttcatcgaaactcttatctataaaccatctcacttacactatttaagtagattcctagtttatagttatataaaacacaattgaatgccagtcgaccttaccatctgtaaaaatgaaaactggggcaaatatgtcacgaaggaatccttgcaaatttgaaattcgaggtcattgcttaaatggtaagaggtgtcattttagtcataattattttgaatggccaccccatgcactgcttgtaagacaaaactttatgttaaacagaatacttaagtctatggataaaagtatagataccttatcagaaataagtggagctgcagagttggacagaacagaagagtatgctcttggtgtagttggagtgctagagagttatataggatcaataaacaatataactaaacaatcagcatgtgttgccatgagcaaactcctcactgaactcaatagtgatgatatcaaaaagctgagggacaatgaagagctaaattcacccaagataagagtgtacaatactgtcatatcatatattgaaagcaacaggaaaaacaataaacaaactatccatctgttaaaaagattgccagcagacgtattgaagaaaaccatcaaaaacacattggatatccataagagcataaccatcaacaacccaaaagaatcaactgttagtgatacaaatgaccatgccaaaaataatgatactacctgacaaatatccttgtagtataacttccatactaataacaagtagatgtagagttactatgtataatcaaaagaacacactatatttcaatcaaaacaacccaaataaccatatgtactcaccgaatcaaacattcaatgaaatccattggacctctcaagaattgattgacacaattcaaaattttctacaacatctaggtattattgaggatatatatacaatatatatattagtgtcataacactcaattctaacactcaccacatcgttacattattaattcaaacaattcaagttgtgggacaaaatggatcccattattaatggaaattctgctaatgtttatctaaccgatagttatttaaaaggtgttatctctttctcagagtgtaatgctttaggaagttacatattcaatggtccttatctcaaaaatgattataccaacttaattagtagacaaaatccattaatagaacacatgaatctaaagaaactaaatataacacagtccttaatatctaagtatcataaaggtgaaataaaattagaagaacctacttattttcagtcattacttatgacatacaagagtatgacctcgtcagaacagattgctaccactaatttacttaaaaagataataagaagagctatagaaataagtgatgtcaaagtctatgctatattgaataaactagggcttaaagaaaaggacaagattaaatccaacaatggacaagatgaagacaactcagttattacgaccataatcaaagatgatatactttcagctgttaaagataatcaatctcatcttaaagcagacaaaaatcactctacaaaacaaaaagacacaatcaaaacaacactcttgaagaaattgatgtgttcaatgcaacatcctccatcatggttaatacattggtttaacttatacacaaaattaaacaacatattaacacagtatcgatcaaatgaggtaaaaaaccatgggtttacattgatagataatcaaactcttagtggatttcaatttattttgaaccaatatggttgtatagtttatcataaggaactcaaaagaattactgtgacaacctataatcaattcttgacatggaaagatattagccttagtagattaaatgtttgtttaattacatggattagtaactgcttgaacacattaaataaaagcttaggcttaagatgcggattcaataatgttatcttgacacaactattcctttatggagattgtatactaaagctatttcacaatgaggggttctacataataaaagaggtagagggatttattatgtctctaattttaaatataacagaagaagatcaattcagaaaacgattttataatagtatgctcaacaacatcacagatgctgctaataaagctcagaaaaatctgctatcaagagtatgtcatacattattagataagacagtgtccgataatataataaatggcagatggataattctattaagtaagttccttaaattaattaagcttgcaggtgacaataaccttaacaatctgagtgaactatattttttgttcagaatatttggacacccaatggtagatgaaagacaagccatggatgctgttaaaattaattgcaatgagaccaaattttacttgttaagcagtctgagtatgttaagaggtgcctttatatatagaattataaaagggtttgtaaataattacaacagatggcctactttaagaaatgctattgttttacccttaagatggttaacttactataaactaaacacttatccttctttgttggaacttacagaaagagatttgattgtgttatcaggactacgtttctatcgtgagtttcggttgcctaaaaaagtggatcttgaaatgattataaatgataaagctatatcacctcctaaaaatttgatatggactagtttccctagaaattacatgccatcacacatacaaaactatatagaacatgaaaaattaaaattttccgagagtgataaatcaagaagagtattagagtattatttaagagataacaaattcaatgaatgtgatttatacaactgtgtagttaatcaaagttatctcaacaaccctaatcatgtggtatcattgacaggcaaagaaagagaactcagtgtaggtagaatgtttgcaatgcaaccgggaatgttcagacaggttcaaatattggcagagaaaatgatagctgaaaacattttacaattctttcctgaaagtcttacaagatatggtgatctagaactacaaaaaatattagaattgaaagcaggaataagtaacaaatcaaatcgctacaatgataattacaacaattacattagtaagtgctctatcatcacagatctcagcaaattcaatcaagcatttcgatatgaaacgtcatgtatttgtagtgatgtgctggatgaactgcatggtgtacaatctctattttcctggttacatttaactattcctcatgtcacaataatatgcacatataggcatgcacccccctatataggagatcatattgtagatcttaacaatgtagatgaacaaagtggattatatagatatcacatgggtggcatcgaagggtggtgtcaaaaactgtggaccatagaagctatatcactattggatctaatatctctcaaagggaaattctcaattactgctttaattaatggtgacaatcaatcaatagatataagcaaaccaatcagactcatggaaggtcaaactcatgctcaagcagattatttgctagcattaaatagccttaaattactgtataaagagtatgcaggcataggccacaaattaaaaggaactgagacttatatatcacgagatatgcaatttatgagtaaaacaattcaacataacggtgtatattacccagctagtataaagaaagtcctaagagtgggaccgtggataaacactatacttgatgatttcaaagtgagtctagaatctataggtagtttgacacaagaattagaatatagaggtgaaagtctattatgcagtttaatatttagaaatgtatggttatataatcagattgctctacaattaaaaaatcatgcattatgtaacaataaactatatttggacatattaaaggttctgaaacacttaaaaaccttttttaatcttgataatattgatacagcattaacattgtatatgaatttacccatgttatttggtggtggtgatcccaacttgttatatcgaagtttctatagaagaactcctgacttcctcacagaggctatagttcactctgtgttcatacttagttattatacaaaccatgacttaaaagataaacttcaagatctgtcagatgatagattgaataagttcttaacatgcataatcacgtttgacaaaaaccctaatgctgaattcgtaacattgatgagagatcctcaagctttagggtctgagagacaagctaaaattactagcgaaatcaatagactggcagttacagaggttttgagtacagctccaaacaaaatattctccaaaagtgcacaacattatactactacagagatagatctaaatgatattatgcaaaatatagaacctacatatcctcatgggctaagagttgtttatgaaagtttacccttttataaagcagagaaaatagtaaatcttatatcaggtacaaaatctataactaacatactggaaaaaacttctgccatagacttaacagatattgatagagccactgagatgatgaggaaaaacataactttgcttataaggatacttccattggattgtaacagagataaaagagagatattgagtatggaaaacctaagtattactgaattaagcaaatatgttagggaaagatcttggtctttatccaatatagttggtgttacatcacccagtatcatgtatacaatggacatcaaatatactacaagcactatatctagtggcataattatagagaaatataatgttaacagtttaacacgtggtgagagaggacccactaaaccatgggttggttcatctacacaagagaaaaaaacaatgccagtttataatagacaagtcttaaccaaaaaacagagagatcaaatagatctattagcaaaattggattgggtgtatgcatctatagataacaaggatgaattcatggaagaactcagcataggaacccttgggttaacatatgaaaaggccaagaaattatttccacaatatttaagtgtcaattatttgcatcgccttacagtcagtagtagaccatgtgaattccctgcatcaataccagcttatagaacaacaaattatcactttgacactagccctattaatcgcatattaacagaaaagtatggtgatgaagatattgacatagtattccaaaactgtataagctttggccttagtttaatgtcagtagtagaacaatttactaatgtatgtcctaacagaattattctcatacctaagcttaatgagatacatttgatgaaacctcccatattcacaggtgatgttgatattcacaagttaaaacaagtgatacaaaaacagcatatgtttttaccagacaaaataagtttgactcaatatgtggaattattcttaagtaataaaacactcaaatctggatctcatgttaattctaatttaatattggcacataaaatatctgactattttcataatacttacattttaagtactaatttagctggacattggattctgattatacaacttatgaaagattctaaaggtatttttgaaaaagattggggagagggatatataactgatcatatgtttattaatttgaaagttttcttcaatgcttataagacctatctcttgtgttttcataaaggttatggcaaagcaaagctggagtgtgatatgaacacttcagatcttctatgtgtattggaattaatagacagtagttattggaagtctatgtctaaggtatttttagaacaaaaagttatcaaatacattcttagccaagatgcaagtttacatagagtaaaaggatgtcatagcttcaaattatggtttcttaaacgtcttaatgtagcagaattcacagtttgcccttgggttgttaacatagattatcatccaacacatatgaaagcaatattaacttatatagatcttgttagaatgggattgataaatatagatagaatacacattaaaaataaacacaaattcaatgatgaattttatacttctaatctcttctacattaattataacttctcagataatactcatctattaactaaacatataaggattgctaattctgaattagaaaataattacaacaaattatatcatcctacaccagaaaccctagagaatatactagccaatccgattaaaagtaatgacaaaaagacactgaatgactattgtataggtaaaaatgttgactcaataatgttaccattgttatctaataagaagcttattaaatcgtctgcaatgattagaaccaattacagcaaacaagatttgtataatttattccctatggttgtgattgatagaattatagatcattcaggcaatacagccaaatccaaccaactttacactactacttcccaccaaatatctttagtgcacaatagcacatcactttactgcatgcttccttggcatcatattaatagattcaattttgtatttagttctacaggttgtaaaattagtatagagtatattttaaaagatcttaaaattaaagatcccaattgtatagcattcataggtgaaggagcagggaatttattattgcgtacagtagtggaacttcatcctgacataagatatatttacagaagtctgaaagattgcaatgatcatagtttacctattgagtttttaaggctgtacaatggacatatcaacattgattatggtgaaaatttgaccattcctgctacagatgcaaccaacaacattcattggtcttatttacatataaagtttgctgaacctatcagtctttttgtctgtgatgccgaattgtctgtaacagtcaactggagtaaaattataatagaatggagcaagcatgtaagaaagtgcaagtactgttcctcagttaataaatgtatgttaatagtaaaatatcatgctcaagatgatattgatttcaaattagacaatataactatattaaaaacttatgtatgcttaggcagtaagttaaagggatcggaggtttacttagtccttacaataggtcctgcgaatatattcccagtatttaatgtagtacaaaatgctaaattgatactatcaagaaccaaaaatttcatcatgcctaagaaagctgataaagagtctattgatgcaaatattaaaagtttgataccctttctttgttaccctataacaaaaaaaggaattaatactgcattgtcaaaactaaagagtgttgttagtggagatatactatcatattctatagctggacgtaatgaagttttcagcaataaacttataaatcataagcatatgaacatcttaaaatggttcaatcatgttttaaatttcagatcaacagaactaaactataaccatttatatatggtagaatctacatatccttacctaagtgaattgttaaacagcttgacaaccaatgaacttaaaaaactgattaaaatcacaggtagtctgttatacaactttcataatgaataatgaataaagatcttataataaaaattcccatagctatacactaacactgtattcaattatagttattaaaaattaaaaatcgtacgattttttaaataacttttagtgaactaatcctaaagttatcattttaatcttggaggaataaatttaaaccctaatctaattggtttatatgtgtattaactaaattacgagatattagtttttgacactttttttctcgtgggtcggcatggcatctccacctcctcgcggtccgacctgggcatccgaaggaggacgcacgtccactcggatggctaagggagctgctaacaaagcccgaaaggaagctgagttggctgctgccaccgctgagcaataactagcataaccccttggggcctctaaacgggtcttgaggggttttttgctgaaaggaggaactatatacgcgtaagcttctcgacccattctcatgtttgacagcttatcatcgaatttctgccattcatccgcttattatcacttattcaggcgtagcaaccaggcgtttaagggcaccaataactgccttaaaaaaattacgccccgccctgccactcatcgcagtactgttgtaattcattaagcattctgccgacatggaagccatcacagacggcatgatgaacctgaatcgccagcggcatcagcaccttgtcgccttgcgtataatatttgcccatggtgaaaacgggggcgaagaagttgtccatattggccacgtttaaatcaaaactggtgaaactcacccagggattggctgagacgaaaaacatattctcaataaaccctttagggaaataggccaggttttcaccgtaacacgccacatcttgcgaatatatgtgtagaaactgccggaaatcgtcgtggtattcactccagagcgatgaaaacgtttcagtttgctcatggaaaacggtgtaacaagggtgaacactatcccatatcaccagctcaccgtctttcattgccatacggaattccggatgagcattcatcaggcgggcaagaatgtgaataaaggccggataaaacttgtgcttatttttctttacggtctttaaaaaggccgtaatatccagctgaacggtctggttataggtacattgagcaactgactgaaatgcctcaaaatgttctttacgatgccattgggatatatcaacggtggtatatccagtgatttttttctccattttagcttccttagctcctgaaaatctcgataactcaaaaaatacgcccggtagtgatcttatttcattatggtgaaagttggaacctcttacgtgccgatcaacgtctcattttcgccaaaagttggcccagggcttcccggtatcaacagggacaccaggatttatttattctgcgaagtgatcttccgtcacaggtatttattcgcgataagctcatggagcggcgtaaccgtcgcacaggaaggacagagaaagcgcggatctgggaagtgacggacagaacggtcaggacctggattggggaggcggttgccgccgctgctgctgacggtgtgacgttctctgttccggtcacaccacatacgttccgccattcctatgcgatgcacatgctgtatgccggtataccgctgaaagttctgcaaagcctgatgggacataagtccatcagttcaacggaagtctacacgaaggtttttgcgctggatgtggctgcccggcaccgggtgcagtttgcgatgccggagtctgatgcggttgcgatgctgaaacaattatcctgagaataaatgccttggcctttatatggaaatgtggaactgagtggatatgctgtttttgtctgttaaacagagaagctggctgttatccactgagaagcgaacgaaacagtcgggaaaatctcccattatcgtagagatccgcattattaatctcaggagcctgtgtagcgtttataggaagtagtgttctgtcatgatgcctgcaagcggtaacgaaaacgatttgaatatgccttcaggaacaatagaaatcttcgtgcggtgttacgttgaagtggagcggattatgtcagcaatggacagaacaacctaatgaacacagaaccatgatgtggtctgtccttttacagccagtaggctcgccgcagtcgagcgacggcgaagccctcgagtgagcgaggaagcaccagggaacagcacttatatattctgcttacacacgatgcctgaaaaaacttcccttggggttatccacttatccacggggatatttttataattattttttttatagtttttagatcttcttttttagagcgccttgtaggcctttatccatgctggttctagagaaggtgttgtgacaaattgccctttcagtgtgacaaatcaccctcaaatgacagtcctgtctgtgacaaattgcccttaaccctgtgacaaattgccctcagaagaagctgttttttcacaaagttatccctgcttattgactcttttttatttagtgtgacaatctaaaaacttgtcacacttcacatggatctgtcatggcggaaacagcggttatcaatcacaagaaacgtaaaaatagcccgcgaatcgtccagtcaaacgacctcactgaggcggcatatagtctctcccgggatcaaaaacgtatgctgtatctgttcgttgaccagatcagaaaatctgatggcaccctacaggaacatgacggtatctgcgagatccatgttgctaaatatgctgaaatattcggattgacctctgcggaagccagtaaggatatacggcaggcattgaagagtttcgcggggaaggaagtggttttttatcgccctgaagaggatgccggcgatgaaaaaggctatgaatcttttccttggtttatcaaacgtgcgcacagtccatccagagggctttacagtgtacatatcaacccatatctcattcccttctttatcgggttacagaaccggtttacgcagtttcggcttagtgaaacaaaagaaatcaccaatccgtatgccatgcgtttatacgaatccctgtgtcagtatcgtaagccggatggctcaggcatcgtctctctgaaaatcgactggatcatagagcgttaccagctgcctcaaagttaccagcgtatgcctgacttccgccgccgcttcctgcaggtctgtgttaatgagatcaacagcagaactccaatgcgcctctcatacattgagaaaaagaaaggccgccagacgactcatatcgtattttccttccgcgatatcacttccatgacgacaggatagtctgagggttatctgtcacagatttgagggtggttcgtcacatttgttctgacctactgagggtaatttgtcacagttttgctgtttccttcagcctgcatggattttctcatactttttgaactgtaatttttaaggaagccaaatttgagggcagtttgtcacagttgatttccttctctttcccttcgtcatgtgacctgatatcgggggttagttcgtcatcattgatgagggttgattatcacagtttattactctgaattggctatccgcgtgtgtacctctacctggagtttttcccacggtggatatttcttcttgcgctgagcgtaagagctatctgacagaacagttcttctttgcttcctcgccagttcgctcgctatgctcggttacacggctgcggcgagcgctagtgataataagtgactgaggtatgtgctcttcttatctccttttgtagtgttgctcttattttaaacaactttgcggttttttgatgactttgcgattttgttgttgctttgcagtaaattgcaagatttaataaaaaaacgcaaagcaatgattaaaggatgttcagaatgaaactcatggaaacacttaaccagtgcataaacgctggtcatgaaatgacgaaggctatcgccattgcacagtttaatgatgacagcccggaagcgaggaaaataacccggcgctggagaataggtgaagcagcggatttagttggggtttcttctcaggctatcagagatgccgagaaagcagggcgactaccgcacccggatatggaaattcgaggacgggttgagcaacgtgttggttatacaattgaacaaattaatcatatgcgtgatgtgtttggtacgcgattgcgacgtgctgaagacgtatttccaccggtgatcggggttgctgcccataaaggtggcgtttacaaaacctcagtttctgttcatcttgctcaggatctggctctgaaggggctacgtgttttgctcgtggaaggtaacgacccccagggaacagcctcaatgtatcacggatgggtaccagatcttcatattcatgcagaagacactctcctgcctttctatcttggggaaaaggacgatgtcacttatgcaataaagcccacttgctggccggggcttgacattattccttcctgtctggctctgcaccgtattgaaactgagttaatgggcaaatttgatgaaggtaaactgcccaccgatccacacctgatgctccgactggccattgaaactgttgctcatgactatgatgtcatagttattgacagcgcgcctaacctgggtatcggcacgattaatgtcgtatgtgctgctgatgtgctgattgttcccacgcctgctgagttgtttgactacacctccgcactgcagtttttcgatatgcttcgtgatctgctcaagaacgttgatcttaaagggttcgagcctgatgtacgtattttgcttaccaaatacagcaatagtaatggctctcagtccccgtggatggaggagcaaattcgggatgcctggggaagcatggttctaaaaaatgttgtacgtgaaacggatgaagttggtaaaggtcagatccggatgagaactgtttttgaacaggccattgatcaacgctcttcaactggtgcctggagaaatgctctttctatttgggaacctgtctgcaatgaaattttcgatcgtctgattaaaccacgctgggagattagataatgaagcgtgcgcctgttattccaaaacatacgctcaatactcaaccggttgaagatacttcgttatcgacaccagctgccccgatggtggattcgttaattgcgcgcgtaggagtaatggctcgcggtaatgccattactttgcctgtatgtggtcgggatgtgaagtttactcttgaagtgctccggggtgatagtgttgagaagacctctcgggtatggtcaggtaatgaacgtgaccaggagctgcttactgaggacgcactggatgatctcatcccttcttttctactgactggtcaacagacaccggcgttcggtcgaagagtatctggtgtcatagaaattgccgatgggagtcgccgtcgtaaagctgctgcacttaccgaaagtgattatcgtgttctggttggcgagctggatgatgagcagatggctgcattatccagattgggtaacgattatcgcccaacaagtgcttatgaacgtggtcagcgttatgcaagccgattgcagaatgaatttgctggaaatatttctgcgctggctgatgcggaaaatatttcacgtaagattattacccgctgtatcaacaccgccaaattgcctaaatcagttgttgctcttttttctcaccccggtgaactatctgcccggtcaggtgatgcacttcaaaaagcctttacagataaagaggaattacttaagcagcaggcatctaaccttcatgagcagaaaaaagctggggtgatatttgaagctgaagaagttatcactcttttaacttctgtgcttaaaacgtcatctgcatcaagaactagtttaagctcacgacatcagtttgctcctggagcgacagtattgtataagggcgataaaatggtgcttaacctggacaggtctcgtgttccaactgagtgtatagagaaaattgaggccattcttaaggaacttgaaaagccagcaccctgatgcgaccacgttttagtctacgtttatctgtctttacttaatgtcctttgttacaggccagaaagcataactggcctgaatattctctctgggcccactgttccacttgtatcgtcggtctgataatcagactgggaccacggtcccactcgtatcgtcggtctgattattagtctgggaccacggtcccactcgtatcgtcggtctgattattagtctgggaccacggtcccactcgtatcgtcggtctgataatcagactgggaccacggtcccactcgtatcgtcggtctgattattagtctgggaccatggtcccactcgtatcgtcggtctgattattagtctgggaccacggtcccactcgtatcgtcggtctgattattagtctggaaccacggtcccactcgtatcgtcggtctgattattagtctgggaccacggtcccactcgtatcgtcggtctgattattagtctgggaccacgatcccactcgtgttgtcggtctgattatcggtctgggaccacggtcccacttgtattgtcgatcagactatcagcgtgagactacgattccatcaatgcctgtcaagggcaagtattgacatgtcgtcgtaacctgtagaacggagtaacctcggtgtgcggttgtatgcctgctgtggattgctgctgtgtcctgcttatccacaacattttgcgcacggttatgtggacaaaatacctggttacccaggccgtgccggcacgttaaccgggctgcatccgatgcaagtgtgtcgctgtcgagttt

SEQ ID NO: 103 - DNA, 22638 bp, Artificial Sequence
  Description of Artificial Sequence: Synthetic polynucleotide
aaacggatccttcgaaacgaaattaatacgactcactatagggaagtttttcgcgtctgatgaggccgttaggccgaaactcctctccggagtcacgcgaaaaaatgcgtacaacaaacttgcataaaccaaaaaaatggggcaaataagaatttgataagtaccacttaaatttaactcccttgcttagcgatgggttcgaattcgctatcgatgataaaagtacgtctacaaaatctatttgataatgatgaagtagcgctactaaaaataacgtgttatacggataaactaatacatctaacgaatgcgctagcgaaagcggtaatacatacgataaaactaaatggtatagtatttgtacatgtaataacgtcgtcggatatatgtccgaataataatatagtagtaaaatcgaattttacgacgatgccggtactacaaaatggtggttatatatgggaaatgatggaactaacgcattgttcgcaaccgaatggtctactagatgataattgtgaaataaaattttcgaaaaaactatcggattcgacgatgacgaattatatgaatcaactatcggaactactaggttttgatctaaatccgtaaattataattaatatcaactagcaaatcaatgtcactaacaccattagttaatataaaacttaacagaagacaaaaatggggcaaataaatcaattcagccaacccaaccatggatacgacgcataatgataatacgccgcaacgtctaatgataacggatatgcgtccgctatcgctagaaacgataataacgtcgctaacgcgtgatataataacgcataaatttatatatctaataaatcatgaatgtatagtacgtaaactagatgaacgtcaagcgacgtttacgtttctagtaaattatgaaatgaaactactacataaagtaggttcgacgaaatataaaaaatatacggaatataatacgaaatatggtacgtttccgatgccgatatttataaatcatgatggttttctagaatgtataggtataaaaccgacgaaacatacgccgataatatataaatatgatctaaatccgtaaatttcaacacaatattcacacaatctaaaacaacaactctatgcataactatactccatagtccagatggagcctgaaaattatagtaatttaaaattaaggagagatataagatagaagatggggcaaatacaaagatggctcttagcaaagtcaagttgaatgatacactcaacaaagatcaacttctgtcatccagcaaatacaccatccaacggagcacaggagatagtattgatactcctaattatgatgtgcagaaacacatcaataagttatgtggcatgttattaatcacagaagatgctaatcataaattcactgggttaataggtatgttatatgcgatgtctaggttaggaagagaagacaccataaaaatactcagagatgcgggatatcatgtaaaagcaaatggagtagatgtaacaacacatcgtcaagacattaatggaaaagaaatgaaatttgaagtgttaacattggcaagcttaacaactgaaattcaaatcaacattgagatagaatctagaaaatcctacaaaaaaatgctaaaagaaatgggagaggtagctccagaatacaggcatgactctcctgattgtgggatgataatattatgtatagcagcattagtaataactaaattagcagcaggggacagatctggtcttacagccgtgattaggagagctaataatgtcctaaaaaatgaaatgaaacgttacaaaggcttactacccaaggacatagccaacagcttctatgaagtgtttgaaaaacatccccactttatagatgtttttgttcattttggtatagcacaatcttctaccagaggtggcagtagagttgaagggatttttgcaggattgtttatgaatgcctatggtgcagggcaagtgatgttacggtggggagtcttagcaaaatcagttaaaaatattatgttaggacatgctagtgtgcaagcagaaatggaacaagttgttgaggtttatgaatatgcccaaaaattgggtggtgaagcaggattctaccatatattgaacaacccaaaagcatcattattatctttgactcaatttcctcacttctccagtgtagtattaggcaatgctgctggcctaggcataatgggagagtacagaggtacaccgaggaatcaagatctatatgatgcagcaaaggcatatgctgaacaactcaaagaaaatggtgtgattaactacagtgtactagacttgacagcagaagaactagaggctatcaaacatcagcttaatccaaaagataatgatgtagagctttgagttaataaaaaatggggcaaataaatcatcatggaaaagtttgctcctgaattccatggagaagatgcaaacaacagggctactaaattcctagaatcaataaagggcaaattcacatcacccaaagatcccaagaaaaaagatagtatcatatctgtcaactcaatagatatagaagtaaccaaagaaagccctataacatcaaattcaactattatcaacccaacaaatgagacagatgatactgcagggaacaagcccaattatcaaagaaaacctctagtaagtttcaaagaagaccctacaccaagtgataatcccttttctaaactatacaaagaaaccatagaaacatttgataacaatgaagaagaatccagctattcatacgaagaaataaatgatcagacaaacgataatataacagcaagattagataggattgatgaaaaattaagtgaaatactaggaatgcttcacacattagtagtggcaagtgcaggacctacatctgctcgggatggtataagagatgccatgattggtttaagagaagaaatgatagaaaaaatcagaactgaagcattaatgaccaatgacagattagaagctatggcaagactcaggaatgaggaaagtgaaaagatggcaaaagacacatcagatgaagtgtctctcaatccaacatcagagaaattgaacaacctattggaagggaatgatagtgacaatgatctatcacttgaagatttctgattagttaccactcttcacatcaacacacaataccaacagaagaccaacaaactaaccaacccaatcatccaaccaaacatccatccgccaatcagccaaacagccaacaaaacaaccagccaatccaaaactaaccacccggaaaaaatctataatatagttacaaaaaaaggaaagggtggggcaaatatggaaacatacgtgaacaagcttcacgaaggctccacatacacagctgctgttcaatacaatgtcttagaaaaagacgatgaccctgcatcacttacaatatgggtgcccatgttccaatcatctatgccagcagatttacttataaaagaactagctaatgtcaacatactagtgaaacaaatatccacacccaagggaccttcactaagagtcatgataaactcaagaagtgcagtgctagcacaaatgcccagcaaatttaccatatgcgctaatgtgtccttggatgaaagaagcaaactagcatatgatgtaaccacaccctgtgaaatcaaggcatgtagtctaacatgcctaaaatcaaaaaatatgttgactacagttaaagatctcactatgaagacactcaaccctacacatgatattattgctttatgtgaatttgaaaacatagtaacatcaaaaaaagtcataataccaacatacctaagatccatcagtgtcagaaataaagatctgaacacacttgaaaatataacaaccactgaattcaaaaatgctatcacaaatgcaaaaatcatcccttactcaggattactattagtcatcacagtgactgacaacaaaggagcattcaaatacataaagccacaaagtcaattcatagtagatcttggagcttacctagaaaaagaaagtatatattatgttaccacaaattggaagcacacagctacacgatttgcaatcaaacccatggaagattaacctttttcctctacatcagtgtgttaattcatacaaactttctacctacattcttcacttcaccatcacaatcacaaacactctgtggttcaaccaatcaaacaaaacttatctgaagtcccagatcatcccaagtcattgtttatcagatctagtactcaaataagttaataaaaaatatacacatggacgtccatggggcaaatgcaaacatgtttgtttttcttgttttattgccactagtctctagtcagtgtgttaatcttacaaccagaactcaattaccccctgcatacactaattctttcacacgtggtgtttattaccctgacaaagttttcagatcctcagttttacattcaactcaggacttgttcttacctttcttttccaatgttacttggttccatgctatacatgtctctgggaccaatggtactaagaggtttgataaccctgtcctaccatttaatgatggtgtttattttgcttccactgagaagtctaacataataagaggctggatttttggtactactttagattcgaagacccagtccctacttattgttaataacgctactaatgttgttattaaagtctgtgaatttcaattttgtaatgatccatttttgggtgtttattaccacaaaaacaacaaaagttggatggaaagtgagttcagagtttattctagtgcgaataattgcacttttgaatatgtctctcagccttttcttatggaccttgaaggaaaacagggtaatttcaaaaatcttagggaatttgtgtttaagaatattgatggttattttaaaatatattctaagcacacgcctattaatttagtgcgtgatctccctcagggtttttcggctttagaaccattggtagatttgccaataggtattaacatcactaggtttcaaactttacttgctttacatagaagttatttgactcctggtgattcttcttcaggttggacagctggtgctgcagcttattatgtgggttatcttcaacctaggacttttctattaaaatataatgaaaatggaaccattacagatgctgtagactgtgcacttgaccctctctcagaaacaaagtgtacgttgaaatccttcactgtagaaaaaggaatctatcaaacttctaactttagagtccaaccaacagaatctattgttagatttcctaatattacaaacttgtgcccttttggtgaagtttttaacgccaccagatttgcatctgtttatgcttggaacaggaagagaatcagcaactgtgttgctgattattctgtcctatataattccgcatcattttccacttttaagtgttatggagtgtctcctactaaattaaatgatctctgctttactaatgtctatgcagattcatttgtaattagaggtgatgaagtcagacaaatcgctccagggcaaactggaaagattgctgattataattataaattaccagatgattttacaggctgcgttatagcttggaattctaacaatcttgattctaaggttggtggtaattataattacctgtatagattgtttaggaagtctaatctcaaaccttttgagagagatatttcaactgaaatctatcaggccggtagcacaccttgtaatggtgttgaaggttttaattgttactttcctttacaatcatatggtttccaacccactaatggtgttggttaccaaccatacagagtagtagtactttcttttgaacttctacatgcaccagcaactgtttgtggacctaaaaagtctactaatttggttaaaaacaaatgtgtcaatttcaacttcaatggtttaacaggcacaggtgttcttactgagtctaacaaaaagtttctgcctttccaacaatttggcagagacattgctgacactactgatgctgtccgtgatccacagacacttgagattcttgacattacaccatgttcttttggtggtgtcagtgttataacaccaggaacaaatacttctaaccaggttgctgttctttatcaggatgttaactgcacagaagtccctgttgctattcatgcagatcaacttactcctacttggcgtgtttattctacaggttctaatgtttttcaaacacgtgcaggctgtttaataggggctgaacatgtcaacaactcatatgagtgtgacatacccattggtgcaggtatatgcgctagttatcagactcagactaattctcctcggcgggcacgtagtgtagctagtcaatccatcattgcctacactatgtcacttggtgcagaaaattcagttgcttactctaataactctattgccatacccacaaattttactattagtgttaccacagaaattctaccagtgtctatgaccaagacatcagtagattgtacaatgtacatttgtggtgattcaactgaatgcagcaatcttttgttgcaatatggcagtttttgtacacaattaaaccgtgctttaactggaatagctgttgaacaagacaaaaacacccaagaagtttttgcacaagtcaaacaaatttacaaaacaccaccaattaaagattttggtggttttaatttttcacaaatattaccagatccatcaaaaccaagcaagaggtcatttattgaagatctacttttcaacaaagtgacacttgcagatgctggcttcatcaaacaatatggtgattgccttggtgatattgctgctagagacctcatttgtgcacaaaagtttaacggccttactgttttgccacctttgctcacagatgaaatgattgctcaatacacttctgcactgttagcgggtacaatcacttctggttggacctttggtgcaggtgctgcattacaaataccatttgctatgcaaatggcttataggtttaatggtattggagttacacagaatgttctctatgagaaccaaaaattgattgccaaccaatttaatagtgctattggcaaaattcaagactcactttcttccacagcaagtgcacttggaaaacttcaagatgtggtcaaccaaaatgcacaagctttaaacacgcttgttaaacaacttagctccaattttggtgcaatttcaagtgttttaaatgatatcctttcacgtcttgacaaagttgaggctgaagtgcaaattgataggttgatcacaggcagacttcaaagtttgcagacatatgtgactcaacaattaattagagctgcagaaatcagagcttctgctaatcttgctgctactaaaatgtcagagtgtgtacttggacaatcaaaaagagttgatttttgtggaaagggctatcatcttatgtccttccctcagtcagcacctcatggtgtagtcttcttgcatgtgacttatgtccctgcacaagaaaagaacttcacaactgctcctgccatttgtcatgatggaaaagcacactttcctcgtgaaggtgtctttgtttcaaatggcacacactggtttgtaacacaaaggaatttttatgaaccacaaatcattactacagacaacacatttgtgtctggtaactgtgatgttgtaataggaattgtcaacaacacagtttatgatcctttgcaacctgaattagactcattcaaggaggagttagataaatattttaagaatcatacatcaccagatgttgatttaggtgacatctctggcattaatgcttcagttgtaaacattcaaaaagaaattgaccgcctcaatgaggttgccaagaatttaaatgaatctctcatcgatctccaagaacttggaaagtatgagcagtatataaaatggccatggtacatttggctaggttttatagctggcttgattgccatagtaatggtgacaattatgctttgctgtatgaccagttgctgtagttgtctcaagggctgttgttcttgtggatcctgctgcggactgctcctatactgtaaggccagaagcacaccaatcacactaagcaaggatcaactgagtggtataaataatattgcatttagtaactaaataaaaatagcacctaatcatgttcttacaatggtttactatctgctcatagacaacccatctatcattggattttcttaaaatctgaacttcatcgaaactcttatctataaaccatctcacttacactatttaagtagattcctagtttatagttatataaaacacaattgaatgccagtcgaccttaccatctgtaaaaatgaaaactggggcaaatatgtcacgaaggaatccttgcaaatttgaaattcgaggtcattgcttaaatggtaagaggtgtcattttagtcataattattttgaatggccaccccatgcactgcttgtaagacaaaactttatgttaaacagaatacttaagtctatggataaaagtatagataccttatcagaaataagtggagctgcagagttggacagaacagaagagtatgctcttggtgtagttggagtgctagagagttatataggatcaataaacaatataactaaacaatcagcatgtgttgccatgagcaaactcctcactgaactcaatagtgatgatatcaaaaagctgagggacaatgaagagctaaattcacccaagataagagtgtacaatactgtcatatcatatattgaaagcaacaggaaaaacaataaacaaactatccatctgttaaaaagattgccagcagacgtattgaagaaaaccatcaaaaacacattggatatccataagagcataaccatcaacaacccaaaagaatcaactgttagtgatacaaatgaccatgccaaaaataatgatactacctgacaaatatccttgtagtataacttccatactaataacaagtagatgtagagttactatgtataatcaaaagaacacactatatttcaatcaaaacaacccaaataaccatatgtactcaccgaatcaaacattcaatgaaatccattggacctctcaagaattgattgacacaattcaaaattttctacaacatctaggtattattgaggatatatatacaatatatatattagtgtcataacactcaattctaacactcaccacatcgttacattattaattcaaacaattcaagttgtgggacaaaatggatcccattattaatggaaattctgctaatgtttatctaaccgatagttatttaaaaggtgttatctctttctcagagtgtaatgctttaggaagttacatattcaatggtccttatctcaaaaatgattataccaacttaattagtagacaaaatccattaatagaacacatgaatctaaagaaactaaatataacacagtccttaatatctaagtatcataaaggtgaaataaaattagaagaacctacttattttcagtcattacttatgacatacaagagtatgacctcgtcagaacagattgctaccactaatttacttaaaaagataataagaagagctatagaaataagtgatgtcaaagtctatgctatattgaataaactagggcttaaagaaaaggacaagattaaatccaacaatggacaagatgaagacaactcagttattacgaccataatcaaagatgatatactttcagctgttaaagataatcaatctcatcttaaagcagacaaaaatcactctacaaaacaaaaagacacaatcaaaacaacactcttgaagaaattgatgtgttcaatgcaacatcctccatcatggttaatacattggtttaacttatacacaaaattaaacaacatattaacacagtatcgatcaaatgaggtaaaaaaccatgggtttacattgatagataatcaaactcttagtggatttcaatttattttgaaccaatatggttgtatagtttatcataaggaactcaaaagaattactgtgacaacctataatcaattcttgacatggaaagatattagccttagtagattaaatgtttgtttaattacatggattagtaactgcttgaacacattaaataaaagcttaggcttaagatgcggattcaataatgttatcttgacacaactattcctttatggagattgtatactaaagctatttcacaatgaggggttctacataataaaagaggtagagggatttattatgtctctaattttaaatataacagaagaagatcaattcagaaaacgattttataatagtatgctcaacaacatcacagatgctgctaataaagctcagaaaaatctgctatcaagagtatgtcatacattattagataagacagtgtccgataatataataaatggcagatggataattctattaagtaagttccttaaattaattaagcttgcaggtgacaataaccttaacaatctgagtgaactatattttttgttcagaatatttggacacccaatggtagatgaaagacaagccatggatgctgttaaaattaattgcaatgagaccaaattttacttgttaagcagtctgagtatgttaagaggtgcctttatatatagaattataaaagggtttgtaaataattacaacagatggcctactttaagaaatgctattgttttacccttaagatggttaacttactataaactaaacacttatccttctttgttggaacttacagaaagagatttgattgtgttatcaggactacgtttctatcgtgagtttcggttgcctaaaaaagtggatcttgaaatgattataaatgataaagctatatcacctcctaaaaatttgatatggactagtttccctagaaattacatgccatcacacatacaaaactatatagaacatgaaaaattaaaattttccgagagtgataaatcaagaagagtattagagtattatttaagagataacaaattcaatgaatgtgatttatacaactgtgtagttaatcaaagttatctcaacaaccctaatcatgtggtatcattgacaggcaaagaaagagaactcagtgtaggtagaatgtttgcaatgcaaccgggaatgttcagacaggttcaaatattggcagagaaaatgatagctgaaaacattttacaattctttcctgaaagtcttacaagatatggtgatctagaactacaaaaaatattagaattgaaagcaggaataagtaacaaatcaaatcgctacaatgataattacaacaattacattagtaagtgctctatcatcacagatctcagcaaattcaatcaagcatttcgatatgaaacgtcatgtatttgtagtgatgtgctggatgaactgcatggtgtacaatctctattttcctggttacatttaactattcctcatgtcacaataatatgcacatataggcatgcacccccctatataggagatcatattgtagatcttaacaatgtagatgaacaaagtggattatatagatatcacatgggtggcatcgaagggtggtgtcaaaaactgtggaccatagaagctatatcactattggatctaatatctctcaaagggaaattctcaattactgctttaattaatggtgacaatcaatcaatagatataagcaaaccaatcagactcatggaaggtcaaactcatgctcaagcagattatttgctagcattaaatagccttaaattactgtataaagagtatgcaggcataggccacaaattaaaaggaactgagacttatatatcacgagatatgcaatttatgagtaaaacaattcaacataacggtgtatattacccagctagtataaagaaagtcctaagagtgggaccgtggataaacactatacttgatgatttcaaagtgagtctagaatctataggtagtttgacacaagaattagaatatagaggtgaaagtctattatgcagtttaatatttagaaatgtatggttatataatcagattgctctacaattaaaaaatcatgcattatgtaacaataaactatatttggacatattaaaggttctgaaacacttaaaaaccttttttaatcttgataatattgatacagcattaacattgtatatgaatttacccatgttatttggtggtggtgatcccaacttgttatatcgaagtttctatagaagaactcctgacttcctcacagaggctatagttcactctgtgttcatacttagttattatacaaaccatgacttaaaagataaacttcaagatctgtcagatgatagattgaataagttcttaacatgcataatcacgtttgacaaaaaccctaatgctgaattcgtaacattgatgagagatcctcaagctttagggtctgagagacaagctaaaattactagcgaaatcaatagactggcagttacagaggttttgagtacagctccaaacaaaatattctccaaaagtgcacaacattatactactacagagatagatctaaatgatattatgcaaaatatagaacctacatatcctcatgggctaagagttgtttatgaaagtttacccttttataaagcagagaaaatagtaaatcttatatcaggtacaaaatctataactaacatactggaaaaaacttctgccatagacttaacagatattgatagagccactgagatgatgaggaaaaacataactttgcttataaggatacttccattggattgtaacagagataaaagagagatattgagtatggaaaacctaagtattactgaattaagcaaatatgttagggaaagatcttggtctttatccaatatagttggtgttacatcacccagtatcatgtatacaatggacatcaaatatactacaagcactatatctagtggcataattatagagaaatataatgttaacagtttaacacgtggtgagagaggacccactaaaccatgggttggttcatctacacaagagaaaaaaacaatgccagtttataatagacaagtcttaaccaaaaaacagagagatcaaatagatctattagcaaaattggattgggtgtatgcatctatagataacaaggatgaattcatggaagaactcagcataggaacccttgggttaacatatgaaaaggccaagaaattatttccacaatatttaagtgtcaattatttgcatcgccttacagtcagtagtagaccatgtgaattccctgcatcaataccagcttatagaacaacaaattatcactttgacactagccctattaatcgcatattaacagaaaagtatggtgatgaagatattgacatagtattccaaaactgtataagctttggccttagtttaatgtcagtagtagaacaatttactaatgtatgtcctaacagaattattctcatacctaagcttaatgagatacatttgatgaaacctcccatattcacaggtgatgttgatattcacaagttaaaacaagtgatacaaaaacagcatatgtttttaccagacaaaataagtttgactcaatatgtggaattattcttaagtaataaaacactcaaatctggatctcatgttaattctaatttaatattggcacataaaatatctgactattttcataatacttacattttaagtactaatttagctggacattggattctgattatacaacttatgaaagattctaaaggtatttttgaaaaagattggggagagggatatataactgatcatatgtttattaatttgaaagttttcttcaatgcttataagacctatctcttgtgttttcataaaggttatggcaaagcaaagctggagtgtgatatgaacacttcagatcttctatgtgtattggaattaatagacagtagttattggaagtctatgtctaaggtatttttagaacaaaaagttatcaaatacattcttagccaagatgcaagtttacatagagtaaaaggatgtcatagcttcaaattatggtttcttaaacgtcttaatgtagcagaattcacagtttgcccttgggttgttaacatagattatcatccaacacatatgaaagcaatattaacttatatagatcttgttagaatgggattgataaatatagatagaatacacattaaaaataaacacaaattcaatgatgaattttatacttctaatctcttctacattaattataacttctcagataatactcatctattaactaaacatataaggattgctaattctgaattagaaaataattacaacaaattatatcatcctacaccagaaaccctagagaatatactagccaatccgattaaaagtaatgacaaaaagacactgaatgactattgtataggtaaaaatgttgactcaataatgttaccattgttatctaataagaagcttattaaatcgtctgcaatgattagaaccaattacagcaaacaagatttgtataatttattccctatggttgtgattgatagaattatagatcattcaggcaatacagccaaatccaaccaactttacactactacttcccaccaaatatctttagtgcacaatagcacatcactttactgcatgcttccttggcatcatattaatagattcaattttgtatttagttctacaggttgtaaaattagtatagagtatattttaaaagatcttaaaattaaagatcccaattgtatagcattcataggtgaaggagcagggaatttattattgcgtacagtagtggaacttcatcctgacataagatatatttacagaagtctgaaagattgcaatgatcatagtttacctattgagtttttaaggctgtacaatggacatatcaacattgattatggtgaaaatttgaccattcctgctacagatgcaaccaacaacattcattggtcttatttacatataaagtttgctgaacctatcagtctttttgtctgtgatgccgaattgtctgtaacagtcaactggagtaaaattataatagaatggagcaagcatgtaagaaagtgcaagtactgttcctcagttaataaatgtatgttaatagtaaaatatcatgctcaagatgatattgatttcaaattagacaatataactatattaaaaacttatgtatgcttaggcagtaagttaaagggatcggaggtttacttagtccttacaataggtcctgcgaatatattcccagtatttaatgtagtacaaaatgctaaattgatactatcaagaaccaaaaatttcatcatgcctaagaaagctgataaagagtctattgatgcaaatattaaaagtttgataccctttctttgttaccctataacaaaaaaaggaattaatactgcattgtcaaaactaaagagtgttgttagtggagatatactatcatattctatagctggacgtaatgaagttttcagcaataaacttataaatcataagcatatgaacatcttaaaatggttcaatcatgttttaaatttcagatcaacagaactaaactataaccatttatatatggtagaatctacatatccttacctaagtgaattgttaaacagcttgacaaccaatgaacttaaaaaactgattaaaatcacaggtagtctgttatacaactttcataatgaataatgaataaagatcttataataaaaattcccatagctatacactaacactgtattcaattatagttattaaaaattaaaaatcgtacgattttttaaataacttttagtgaactaatcctaaagttatcattttaatcttggaggaataaatttaaaccctaatctaattggtttatatgtgtattaactaaattacgagatattagtttttgacactttttttctcgtgggtcggcatggcatctccacctcctcgcggtccgacctgggcatccgaaggaggacgcacgtccactcggatggctaagggagctgctaacaaagcccgaaaggaagctgagttggctgctgccaccgctgagcaataactagcataaccccttggggcctctaaacgggtcttgaggggttttttgctgaaaggaggaactatatacgcgtaagcttctcgacccattctcatgtttgacagcttatcatcgaatttctgccattcatccgcttattatcacttattcaggcgtagcaaccaggcgtttaagggcaccaataactgccttaaaaaaattacgccccgccctgccactcatcgcagtactgttgtaattcattaagcattctgccgacatggaagccatcacagacggcatgatgaacctgaatcgccagcggcatcagcaccttgtcgccttgcgtataatatttgcccatggtgaaaacgggggcgaagaagttgtccatattggccacgtttaaatcaaaactggtgaaactcacccagggattggctgagacgaaaaacatattctcaataaaccctttagggaaataggccaggttttcaccgtaacacgccacatcttgcgaatatatgtgtagaaactgccggaaatcgtcgtggtattcactccagagcgatgaaaacgtttcagtttgctcatggaaaacggtgtaacaagggtgaacactatcccatatcaccagctcaccgtctttcattgccatacggaattccggatgagcattcatcaggcgggcaagaatgtgaataaaggccggataaaacttgtgcttatttttctttacggtctttaaaaaggccgtaatatccagctgaacggtctggttataggtacattgagcaactgactgaaatgcctcaaaatgttctttacgatgccattgggatatatcaacggtggtatatccagtgatttttttctccattttagcttccttagctcctgaaaatctcgataactcaaaaaatacgcccggtagtgatcttatttcattatggtgaaagttggaacctcttacgtgccgatcaacgtctcattttcgccaaaagttggcccagggcttcccggtatcaacagggacaccaggatttatttattctgcgaagtgatcttccgtcacaggtatttattcgcgataagctcatggagcggcgtaaccgtcgcacaggaaggacagagaaagcgcggatctgggaagtgacggacagaacggtcaggacctggattggggaggcggttgccgccgctgctgctgacggtgtgacgttctctgttccggtcacaccacatacgttccgccattcctatgcgatgcacatgctgtatgccggtataccgctgaaagttctgcaaagcctgatgggacataagtccatcagttcaacggaagtctacacgaaggtttttgcgctggatgtggctgcccggcaccgggtgcagtttgcgatgccggagtctgatgcggttgcgatgctgaaacaattatcctgagaataaatgccttggcctttatatggaaatgtggaactgagtggatatgctgtttttgtctgttaaacagagaagctggctgttatccactgagaagcgaacgaaacagtcgggaaaatctcccattatcgtagagatccgcattattaatctcaggagcctgtgtagcgtttataggaagtagtgttctgtcatgatgcctgcaagcggtaacgaaaacgatttgaatatgccttcaggaacaatagaaatcttcgtgcggtgttacgttgaagtggagcggattatgtcagcaatggacagaacaacctaatgaacacagaaccatgatgtggtctgtccttttacagccagtaggctcgccgcagtcgagcgacggcgaagccctcgagtgagcgaggaagcaccagggaacagcacttatatattctgcttacacacgatgcctgaaaaaacttcccttggggttatccacttatccacggggatatttttataattattttttttatagtttttagatcttcttttttagagcgccttgtaggcctttatccatgctggttctagagaaggtgttgtgacaaattgccctttcagtgtgacaaatcaccctcaaatgacagtcctgtctgtgacaaattgcccttaaccctgtgacaaattgccctcagaagaagctgttttttcacaaagttatccctgcttattgactcttttttatttagtgtgacaatctaaaaacttgtcacacttcacatggatctgtcatggcggaaacagcggttatcaatcacaagaaacgtaaaaatagcccgcgaatcgtccagtcaaacgacctcactgaggcggcatatagtctctcccgggatcaaaaacgtatgctgtatctgttcgttgaccagatcagaaaatctgatggcaccctacaggaacatgacggtatctgcgagatccatgttgctaaatatgctgaaatattcggattgacctctgcggaagccagtaaggatatacggcaggcattgaagagtttcgcggggaaggaagtggttttttatcgccctgaagaggatgccggcgatgaaaaaggctatgaatcttttccttggtttatcaaacgtgcgcacagtccatccagagggctttacagtgtacatatcaacccatatctcattcccttctttatcgggttacagaaccggtttacgcagtttcggcttagtgaaacaaaagaaatcaccaatccgtatgccatgcgtttatacgaatccctgtgtcagtatcgtaagccggatggctcaggcatcgtctctctgaaaatcgactggatcatagagcgttaccagctgcctcaaagttaccagcgtatgcctgacttccgccgccgcttcctgcaggtctgtgttaatgagatcaacagcagaactccaatgcgcctctcatacattgagaaaaagaaaggccgccagacgactcatatcgtattttccttccgcgatatcacttccatgacgacaggatagtctgagggttatctgtcacagatttgagggtggttcgtcacatttgttctgacctactgagggtaatttgtcacagttttgctgtttccttcagcctgcatggattttctcatactttttgaactgtaatttttaaggaagccaaatttgagggcagtttgtcacagttgatttccttctctttcccttcgtcatgtgacctgatatcgggggttagttcgtcatcattgatgagggttgattatcacagtttattactctgaattggctatccgcgtgtgtacctctacctggagtttttcccacggtggatatttcttcttgcgctgagcgtaagagctatctgacagaacagttcttctttgcttcctcgccagttcgctcgctatgctcggttacacggctgcggcgagcgctagtgataataagtgactgaggtatgtgctcttcttatctccttttgtagtgttgctcttattttaaacaactttgcggttttttgatgactttgcgattttgttgttgctttgcagtaaattgcaagatttaataaaaaaacgcaaagcaatgattaaaggatgttcagaatgaaactcatggaaacacttaaccagtgcataaacgctggtcatgaaatgacgaaggctatcgccattgcacagtttaatgatgacagcccggaagcgaggaaaataacccggcgctggagaataggtgaagcagcggatttagttggggtttcttctcaggctatcagagatgccgagaaagcagggcgactaccgcacccggatatggaaattcgaggacgggttgagcaacgtgttggttatacaattgaacaaattaatcatatgcgtgatgtgtttggtacgcgattgcgacgtgctgaagacgtatttccaccggtgatcggggttgctgcccataaaggtggcgtttacaaaacctcagtttctgttcatcttgctcaggatctggctctgaaggggctacgtgttttgctcgtggaaggtaacgacccccagggaacagcctcaatgtatcacggatgggtaccagatcttcatattcatgcagaagacactctcctgcctttctatcttggggaaaaggacgatgtcacttatgcaataaagcccacttgctggccggggcttgacattattccttcctgtctggctctgcaccgtattgaaactgagttaatgggcaaatttgatgaaggtaaactgcccaccgatccacacctgatgctccgactggccattgaaactgttgctcatgactatgatgtcatagttattgacagcgcgcctaacctgggtatcggcacgattaatgtcgtatgtgctgctgatgtgctgattgttcccacgcctgctgagttgtttgactacacctccgcactgcagtttttcgatatgcttcgtgatctgctcaagaacgttgatcttaaagggttcgagcctgatgtacgtattttgcttaccaaatacagcaatagtaatggctctcagtccccgtggatggaggagcaaattcgggatgcctggggaagcatggttctaaaaaatgttgtacgtgaaacggatgaagttggtaaaggtcagatccggatgagaactgtttttgaacaggccattgatcaacgctcttcaactggtgcctggagaaatgctctttctatttgggaacctgtctgcaatgaaattttcgatcgtctgattaaaccacgctgggagattagataatgaagcgtgcgcctgttattccaaaacatacgctcaatactcaaccggttgaagatacttcgttatcgacaccagctgccccgatggtggattcgttaattgcgcgcgtaggagtaatggctcgcggtaatgccattactttgcctgtatgtggtcgggatgtgaagtttactcttgaagtgctccggggtgatagtgttgagaagacctctcgggtatggtcaggtaatgaacgtgaccaggagctgcttactgaggacgcactggatgatctcatcccttcttttctactgactggtcaacagacaccggcgttcggtcgaagagtatctggtgtcatagaaattgccgatgggagtcgccgtcgtaaagctgctgcacttaccgaaagtgattatcgtgttctggttggcgagctggatgatgagcagatggctgcattatccagattgggtaacgattatcgcccaacaagtgcttatgaacgtggtcagcgttatgcaagccgattgcagaatgaatttgctggaaatatttctgcgctggctgatgcggaaaatatttcacgtaagattattacccgctgtatcaacaccgccaaattgcctaaatcagttgttgctcttttttctcaccccggtgaactatctgcccggtcaggtgatgcacttcaaaaagcctttacagataaagaggaattacttaagcagcaggcatctaaccttcatgagcagaaaaaagctggggtgatatttgaagctgaagaagttatcactcttttaacttctgtgcttaaaacgtcatctgcatcaagaactagtttaagctcacgacatcagtttgctcctggagcgacagtattgtataagggcgataaaatggtgcttaacctggacaggtctcgtgttccaactgagtgtatagagaaaattgaggccattcttaaggaacttgaaaagccagcaccctgatgcgaccacgttttagtctacgtttatctgtctttacttaatgtcctttgttacaggccagaaagcataactggcctgaatattctctctgggcccactgttccacttgtatcgtcggtctgataatcagactgggaccacggtcccactcgtatcgtcggtctgattattagtctgggaccacggtcccactcgtatcgtcggtctgattattagtctgggaccacggtcccactcgtatcgtcggtctgataatcagactgggaccacggtcccactcgtatcgtcggtctgattattagtctgggaccatggtcccactcgtatcgtcggtctgattattagtctgggaccacggtcccactcgtatcgtcggtctgattattagtctggaaccacggtcccactcgtatcgtcggtctgattattagtctgggaccacggtcccactcgtatcgtcggtctgattattagtctgggaccacgatcccactcgtgttgtcggtctgattatcggtctgggaccacggtcccacttgtattgtcgatcagactatcagcgtgagactacgattccatcaatgcctgtcaagggcaagtattgacatgtcgtcgtaacctgtagaacggagtaacctcggtgtgcggttgtatgcctgctgtggattgctgctgtgtcctgcttatccacaacattttgcgcacggttatgtggacaaaatacctggttacccaggccgtgccggcacgttaaccgggctgcatccgatgcaagtgtgtcgctgtcgagttt

SEQ ID NO: 104 - DNA, 16713 bp, Artificial Sequence
  Description of Artificial Sequence: Synthetic polynucleotide
acgcgaaaaaatgcgtacaacaaacttgcataaaccaaaaaaatggggcaaataagaatttgataagtaccacttaaatttaactcccttgcttagcgatggtgagcgagctgattaaggagaacatgcacatgaagctgtacatggagggcaccgtgaacaaccaccacttcaagtgcacatccgagggcgaaggcaagccctacgagggcacccagaccatgagaatcaaggcggtcgagggcggccctctccccttcgccttcgacatcctggctaccagcttcatgtacggcagcaaaaccttcatcaaccacacccagggcatccccgacttctttaagcagtccttccccgagggcttcacatgggagagagtcaccacatacgaagacgggggcgtgctgaccgctacccaggacaccagcctccaggacggctgcctcatctacaacgtcaagatcagaggggtgaacttcccatccaacggccctgtgatgcagaagaaaacactcggctgggaggcctccaccgagaccctgtaccccgctgacggcggcctggaaggcagagccgacatggccctgaagctcgtgggcgggggccacctgatctgcaacttgaagaccacatacagatccaagaaacccgctaagaacctcaagatgcccggcgtctactatgtggacagaagactggaaagaatcaaggaggccgacaaagagacctacgtcgagcagcacgaggtggctgtggccagatactgcgacctccctagcaaactggggcacagatgagtattcaattatagttattaaaaacttaacagaagacaaaaatggggcaaataagaatttgataagtaccacttaaatttaactcccttgcttagcgatgggttcgaattcgctatcgatgataaaagtacgtctacaaaatctatttgataatgatgaagtagcgctactaaaaataacgtgttatacggataaactaatacatctaacgaatgcgctagcgaaagcggtaatacatacgataaaactaaatggtatagtatttgtacatgtaataacgtcgtcggatatatgtccgaataataatatagtagtaaaatcgaattttacgacgatgccggtactacaaaatggtggttatatatgggaaatgatggaactaacgcattgttcgcaaccgaatggtctactagatgataattgtgaaataaaattttcgaaaaaactatcggattcgacgatgacgaattatatgaatcaactatcggaactactaggttttgatctaaatccgtaaattataattaatatcaactagcaaatcaatgtcactaacaccattagttaatataaaacttaacagaagacaaaaatggggcaaataaatcaattcagccaacccaaccatggatacgacgcataatgataatacgccgcaacgtctaatgataacggatatgcgtccgctatcgctagaaacgataataacgtcgctaacgcgtgatataataacgcataaatttatatatctaataaatcatgaatgtatagtacgtaaactagatgaacgtcaagcgacgtttacgtttctagtaaattatgaaatgaaactactacataaagtaggttcgacgaaatataaaaaatatacggaatataatacgaaatatggtacgtttccgatgccgatatttataaatcatgatggttttctagaatgtataggtataaaaccgacgaaacatacgccgataatatataaatatgatctaaatccgtaaatttcaacacaatattcacacaatctaaaacaacaactctatgcataactatactccatagtccagatggagcctgaaaattatagtaatttaaaattaaggagagatataagatagaagatggggcaaatacaaagatggctcttagcaaagtcaagttgaatgatacactcaacaaagatcaacttctgtcatccagcaaatacaccatccaacggagcacaggagatagtattgatactcctaattatgatgtgcagaaacacatcaataagttatgtggcatgttattaatcacagaagatgctaatcataaattcactgggttaataggtatgttatatgcgatgtctaggttaggaagagaagacaccataaaaatactcagagatgcgggatatcatgtaaaagcaaatggagtagatgtaacaacacatcgtcaagacattaatggaaaagaaatgaaatttgaagtgttaacattggcaagcttaacaactgaaattcaaatcaacattgagatagaatctagaaaatcctacaaaaaaatgctaaaagaaatgggagaggtagctccagaatacaggcatgactctcctgattgtgggatgataatattatgtatagcagcattagtaataactaaattagcagcaggggacagatctggtcttacagccgtgattaggagagctaataatgtcctaaaaaatgaaatgaaacgttacaaaggcttactacccaaggacatagccaacagcttctatgaagtgtttgaaaaacatccccactttatagatgtttttgttcattttggtatagcacaatcttctaccagaggtggcagtagagttgaagggatttttgcaggattgtttatgaatgcctatggtgcagggcaagtgatgttacggtggggagtcttagcaaaatcagttaaaaatattatgttaggacatgctagtgtgcaagcagaaatggaacaagttgttgaggtttatgaatatgcccaaaaattgggtggtgaagcaggattctaccatatattgaacaacccaaaagcatcattattatctttgactcaatttcctcacttctccagtgtagtattaggcaatgctgctggcctaggcataatgggagagtacagaggtacaccgaggaatcaagatctatatgatgcagcaaaggcatatgctgaacaactcaaagaaaatggtgtgattaactacagtgtactagacttgacagcagaagaactagaggctatcaaacatcagcttaatccaaaagataatgatgtagagctttgagttaataaaaaatggggcaaataaatcatcatggaaaagtttgctcctgaattccatggagaagatgcaaacaacagggctactaaattcctagaatcaataaagggcaaattcacatcacccaaagatcccaagaaaaaagatagtatcatatctgtcaactcaatagatatagaagtaaccaaagaaagccctataacatcaaattcaactattatcaacccaacaaatgagacagatgatactgcagggaacaagcccaattatcaaagaaaacctctagtaagtttcaaagaagaccctacaccaagtgataatcccttttctaaactatacaaagaaaccatagaaacatttgataacaatgaagaagaatccagctattcatacgaagaaataaatgatcagacaaacgataatataacagcaagattagataggattgatgaaaaattaagtgaaatactaggaatgcttcacacattagtagtggcaagtgcaggacctacatctgctcgggatggtataagagatgccatgattggtttaagagaagaaatgatagaaaaaatcagaactgaagcattaatgaccaatgacagattagaagctatggcaagactcaggaatgaggaaagtgaaaagatggcaaaagacacatcagatgaagtgtctctcaatccaacatcagagaaattgaacaacctattggaagggaatgatagtgacaatgatctatcacttgaagatttctgattagttaccactcttcacatcaacacacaataccaacagaagaccaacaaactaaccaacccaatcatccaaccaaacatccatccgccaatcagccaaacagccaacaaaacaaccagccaatccaaaactaaccacccggaaaaaatctataatatagttacaaaaaaaggaaagggtggggcaaatatggaaacatacgtgaacaagcttcacgaaggctccacatacacagctgctgttcaatacaatgtcttagaaaaagacgatgaccctgcatcacttacaatatgggtgcccatgttccaatcatctatgccagcagatttacttataaaagaactagctaatgtcaacatactagtgaaacaaatatccacacccaagggaccttcactaagagtcatgataaactcaagaagtgcagtgctagcacaaatgcccagcaaatttaccatatgcgctaatgtgtccttggatgaaagaagcaaactagcatatgatgtaaccacaccctgtgaaatcaaggcatgtagtctaacatgcctaaaatcaaaaaatatgttgactacagttaaagatctcactatgaagacactcaaccctacacatgatattattgctttatgtgaatttgaaaacatagtaacatcaaaaaaagtcataataccaacatacctaagatccatcagtgtcagaaataaagatctgaacacacttgaaaatataacaaccactgaattcaaaaatgctatcacaaatgcaaaaatcatcccttactcaggattactattagtcatcacagtgactgacaacaaaggagcattcaaatacataaagccacaaagtcaattcatagtagatcttggagcttacctagaaaaagaaagtatatattatgttaccacaaattggaagcacacagctacacgatttgcaatcaaacccatggaagattaacctttttcctctacatcagtgtgttaattcatacaaactttctacctacattcttcacttcaccatcacaatcacaaacactctgtggttcaaccaatcaaacaaaacttatctgaagtcccagatcatcccaagtcattgtttatcagatctagtactcaaataagttaataaaaaatatacacatggacgtccatggggcaaatgcaaacatgtttgtttttcttgttttattgccactagtctctagtcagtgtgttaatcttacaaccagaactcaattaccccctgcatacactaattctttcacacgtggtgtttattaccctgacaaagttttcagatcctcagttttacattcaactcaggacttgttcttacctttcttttccaatgttacttggttccatgctatacatgtctctgggaccaatggtactaagaggtttgataaccctgtcctaccatttaatgatggtgtttattttgcttccactgagaagtctaacataataagaggctggatttttggtactactttagattcgaagacccagtccctacttattgttaataacgctactaatgttgttattaaagtctgtgaatttcaattttgtaatgatccatttttgggtgtttattaccacaaaaacaacaaaagttggatggaaagtgagttcagagtttattctagtgcgaataattgcacttttgaatatgtctctcagccttttcttatggaccttgaaggaaaacagggtaatttcaaaaatcttagggaatttgtgtttaagaatattgatggttattttaaaatatattctaagcacacgcctattaatttagtgcgtgatctccctcagggtttttcggctttagaaccattggtagatttgccaataggtattaacatcactaggtttcaaactttacttgctttacatagaagttatttgactcctggtgattcttcttcaggttggacagctggtgctgcagcttattatgtgggttatcttcaacctaggacttttctattaaaatataatgaaaatggaaccattacagatgctgtagactgtgcacttgaccctctctcagaaacaaagtgtacgttgaaatccttcactgtagaaaaaggaatctatcaaacttctaactttagagtccaaccaacagaatctattgttagatttcctaatattacaaacttgtgcccttttggtgaagtttttaacgccaccagatttgcatctgtttatgcttggaacaggaagagaatcagcaactgtgttgctgattattctgtcctatataattccgcatcattttccacttttaagtgttatggagtgtctcctactaaattaaatgatctctgctttactaatgtctatgcagattcatttgtaattagaggtgatgaagtcagacaaatcgctccagggcaaactggaaagattgctgattataattataaattaccagatgattttacaggctgcgttatagcttggaattctaacaatcttgattctaaggttggtggtaattataattacctgtatagattgtttaggaagtctaatctcaaaccttttgagagagatatttcaactgaaatctatcaggccggtagcacaccttgtaatggtgttgaaggttttaattgttactttcctttacaatcatatggtttccaacccactaatggtgttggttaccaaccatacagagtagtagtactttcttttgaacttctacatgcaccagcaactgtttgtggacctaaaaagtctactaatttggttaaaaacaaatgtgtcaatttcaacttcaatggtttaacaggcacaggtgttcttactgagtctaacaaaaagtttctgcctttccaacaatttggcagagacattgctgacactactgatgctgtccgtgatccacagacacttgagattcttgacattacaccatgttcttttggtggtgtcagtgttataacaccaggaacaaatacttctaaccaggttgctgttctttatcaggatgttaactgcacagaagtccctgttgctattcatgcagatcaacttactcctacttggcgtgtttattctacaggttctaatgtttttcaaacacgtgcaggctgtttaataggggctgaacatgtcaacaactcatatgagtgtgacatacccattggtgcaggtatatgcgctagttatcagactcagactaattctcctcggcgggcacgtagtgtagctagtcaatccatcattgcctacactatgtcacttggtgcagaaaattcagttgcttactctaataactctattgccatacccacaaattttactattagtgttaccacagaaattctaccagtgtctatgaccaagacatcagtagattgtacaatgtacatttgtggtgattcaactgaatgcagcaatcttttgttgcaatatggcagtttttgtacacaattaaaccgtgctttaactggaatagctgttgaacaagacaaaaacacccaagaagtttttgcacaagtcaaacaaatttacaaaacaccaccaattaaagattttggtggttttaatttttcacaaatattaccagatccatcaaaaccaagcaagaggtcatttattgaagatctacttttcaacaaagtgacacttgcagatgctggcttcatcaaacaatatggtgattgccttggtgatattgctgctagagacctcatttgtgcacaaaagtttaacggccttactgttttgccacctttgctcacagatgaaatgattgctcaatacacttctgcactgttagcgggtacaatcacttctggttggacctttggtgcaggtgctgcattacaaataccatttgctatgcaaatggcttataggtttaatggtattggagttacacagaatgttctctatgagaaccaaaaattgattgccaaccaatttaatagtgctattggcaaaattcaagactcactttcttccacagcaagtgcacttggaaaacttcaagatgtggtcaaccaaaatgcacaagctttaaacacgcttgttaaacaacttagctccaattttggtgcaatttcaagtgttttaaatgatatcctttcacgtcttgacaaagttgaggctgaagtgcaaattgataggttgatcacaggcagacttcaaagtttgcagacatatgtgactcaacaattaattagagctgcagaaatcagagcttctgctaatcttgctgctactaaaatgtcagagtgtgtacttggacaatcaaaaagagttgatttttgtggaaagggctatcatcttatgtccttccctcagtcagcacctcatggtgtagtcttcttgcatgtgacttatgtccctgcacaagaaaagaacttcacaactgctcctgccatttgtcatgatggaaaagcacactttcctcgtgaaggtgtctttgtttcaaatggcacacactggtttgtaacacaaaggaatttttatgaaccacaaatcattactacagacaacacatttgtgtctggtaactgtgatgttgtaataggaattgtcaacaacacagtttatgatcctttgcaacctgaattagactcattcaaggaggagttagataaatattttaagaatcatacatcaccagatgttgatttaggtgacatctctggcattaatgcttcagttgtaaacattcaaaaagaaattgaccgcctcaatgaggttgccaagaatttaaatgaatctctcatcgatctccaagaacttggaaagtatgagcagtatataaaatggccatggtacatttggctaggttttatagctggcttgattgccatagtaatggtgacaattatgctttgctgtatgaccagttgctgtagttgtctcaagggctgttgttcttgtggatcctgctgcaaggccagaagcacaccaatcacactaagcaaggatcaactgagtggtataaataatattgcatttagtaactaaataaaaatagcacctaatcatgttcttacaatggtttactatctgctcatagacaacccatctatcattggattttcttaaaatctgaacttcatcgaaactcttatctataaaccatctcacttacactatttaagtagattcctagtttatagttatataaaacacaattgaatgccagtcgaccttaccatctgtaaaaatgaaaactggggcaaatatgtcacgaaggaatccttgcaaatttgaaattcgaggtcattgcttaaatggtaagaggtgtcattttagtcataattattttgaatggccaccccatgcactgcttgtaagacaaaactttatgttaaacagaatacttaagtctatggataaaagtatagataccttatcagaaataagtggagctgcagagttggacagaacagaagagtatgctcttggtgtagttggagtgctagagagttatataggatcaataaacaatataactaaacaatcagcatgtgttgccatgagcaaactcctcactgaactcaatagtgatgatatcaaaaagctgagggacaatgaagagctaaattcacccaagataagagtgtacaatactgtcatatcatatattgaaagcaacaggaaaaacaataaacaaactatccatctgttaaaaagattgccagcagacgtattgaagaaaaccatcaaaaacacattggatatccataagagcataaccatcaacaacccaaaagaatcaactgttagtgatacaaatgaccatgccaaaaataatgatactacctgacaaatatccttgtagtataacttccatactaataacaagtagatgtagagttactatgtataatcaaaagaacacactatatttcaatcaaaacaacccaaataaccatatgtactcaccgaatcaaacattcaatgaaatccattggacctctcaagaattgattgacacaattcaaaattttctacaacatctaggtattattgaggatatatatacaatatatatattagtgtcataacactcaattctaacactcaccacatcgttacattattaattcaaacaattcaagttgtgggacaaaatggatcccattattaatggaaattctgctaatgtttatctaaccgatagttatttaaaaggtgttatctctttctcagagtgtaatgctttaggaagttacatattcaatggtccttatctcaaaaatgattataccaacttaattagtagacaaaatccattaatagaacacatgaatctaaagaaactaaatataacacagtccttaatatctaagtatcataaaggtgaaataaaattagaagaacctacttattttcagtcattacttatgacatacaagagtatgacctcgtcagaacagattgctaccactaatttacttaaaaagataataagaagagctatagaaataagtgatgtcaaagtctatgctatattgaataaactagggcttaaagaaaaggacaagattaaatccaacaatggacaagatgaagacaactcagttattacgaccataatcaaagatgatatactttcagctgttaaagataatcaatctcatcttaaagcagacaaaaatcactctacaaaacaaaaagacacaatcaaaacaacactcttgaagaaattgatgtgttcaatgcaacatcctccatcatggttaatacattggtttaacttatacacaaaattaaacaacatattaacacagtatcgatcaaatgaggtaaaaaaccatgggtttacattgatagataatcaaactcttagtggatttcaatttattttgaaccaatatggttgtatagtttatcataaggaactcaaaagaattactgtgacaacctataatcaattcttgacatggaaagatattagccttagtagattaaatgtttgtttaattacatggattagtaactgcttgaacacattaaataaaagcttaggcttaagatgcggattcaataatgttatcttgacacaactattcctttatggagattgtatactaaagctatttcacaatgaggggttctacataataaaagaggtagagggatttattatgtctctaattttaaatataacagaagaagatcaattcagaaaacgattttataatagtatgctcaacaacatcacagatgctgctaataaagctcagaaaaatctgctatcaagagtatgtcatacattattagataagacagtgtccgataatataataaatggcagatggataattctattaagtaagttccttaaattaattaagcttgcaggtgacaataaccttaacaatctgagtgaactatattttttgttcagaatatttggacacccaatggtagatgaaagacaagccatggatgctgttaaaattaattgcaatgagaccaaattttacttgttaagcagtctgagtatgttaagaggtgcctttatatatagaattataaaagggtttgtaaataattacaacagatggcctactttaagaaatgctattgttttacccttaagatggttaacttactataaactaaacacttatccttctttgttggaacttacagaaagagatttgattgtgttatcaggactacgtttctatcgtgagtttcggttgcctaaaaaagtggatcttgaaatgattataaatgataaagctatatcacctcctaaaaatttgatatggactagtttccctagaaattacatgccatcacacatacaaaactatatagaacatgaaaaattaaaattttccgagagtgataaatcaagaagagtattagagtattatttaagagataacaaattcaatgaatgtgatttatacaactgtgtagttaatcaaagttatctcaacaaccctaatcatgtggtatcattgacaggcaaagaaagagaactcagtgtaggtagaatgtttgcaatgcaaccgggaatgttcagacaggttcaaatattggcagagaaaatgatagctgaaaacattttacaattctttcctgaaagtcttacaagatatggtgatctagaactacaaaaaatattagaattgaaagcaggaataagtaacaaatcaaatcgctacaatgataattacaacaattacattagtaagtgctctatcatcacagatctcagcaaattcaatcaagcatttcgatatgaaacgtcatgtatttgtagtgatgtgctggatgaactgcatggtgtacaatctctattttcctggttacatttaactattcctcatgtcacaataatatgcacatataggcatgcacccccctatataggagatcatattgtagatcttaacaatgtagatgaacaaagtggattatatagatatcacatgggtggcatcgaagggtggtgtcaaaaactgtggaccatagaagctatatcactattggatctaatatctctcaaagggaaattctcaattactgctttaattaatggtgacaatcaatcaatagatataagcaaaccaatcagactcatggaaggtcaaactcatgctcaagcagattatttgctagcattaaatagccttaaattactgtataaagagtatgcaggcataggccacaaattaaaaggaactgagacttatatatcacgagatatgcaatttatgagtaaaacaattcaacataacggtgtatattacccagctagtataaagaaagtcctaagagtgggaccgtggataaacactatacttgatgatttcaaagtgagtctagaatctataggtagtttgacacaagaattagaatatagaggtgaaagtctattatgcagtttaatatttagaaatgtatggttatataatcagattgctctacaattaaaaaatcatgcattatgtaacaataaactatatttggacatattaaaggttctgaaacacttaaaaaccttttttaatcttgataatattgatacagcattaacattgtatatgaatttacccatgttatttggtggtggtgatcccaacttgttatatcgaagtttctatagaagaactcctgacttcctcacagaggctatagttcactctgtgttcatacttagttattatacaaaccatgacttaaaagataaacttcaagatctgtcagatgatagattgaataagttcttaacatgcataatcacgtttgacaaaaaccctaatgctgaattcgtaacattgatgagagatcctcaagctttagggtctgagagacaagctaaaattactagcgaaatcaatagactggcagttacagaggttttgagtacagctccaaacaaaatattctccaaaagtgcacaacattatactactacagagatagatctaaatgatattatgcaaaatatagaacctacatatcctcatgggctaagagttgtttatgaaagtttacccttttataaagcagagaaaatagtaaatcttatatcaggtacaaaatctataactaacatactggaaaaaacttctgccatagacttaacagatattgatagagccactgagatgatgaggaaaaacataactttgcttataaggatacttccattggattgtaacagagataaaagagagatattgagtatggaaaacctaagtattactgaattaagcaaatatgttagggaaagatcttggtctttatccaatatagttggtgttacatcacccagtatcatgtatacaatggacatcaaatatactacaagcactatatctagtggcataattatagagaaatataatgttaacagtttaacacgtggtgagagaggacccactaaaccatgggttggttcatctacacaagagaaaaaaacaatgccagtttataatagacaagtcttaaccaaaaaacagagagatcaaatagatctattagcaaaattggattgggtgtatgcatctatagataacaaggatgaattcatggaagaactcagcataggaacccttgggttaacatatgaaaaggccaagaaattatttccacaatatttaagtgtcaattatttgcatcgccttacagtcagtagtagaccatgtgaattccctgcatcaataccagcttatagaacaacaaattatcactttgacactagccctattaatcgcatattaacagaaaagtatggtgatgaagatattgacatagtattccaaaactgtataagctttggccttagtttaatgtcagtagtagaacaatttactaatgtatgtcctaacagaattattctcatacctaagcttaatgagatacatttgatgaaacctcccatattcacaggtgatgttgatattcacaagttaaaacaagtgatacaaaaacagcatatgtttttaccagacaaaataagtttgactcaatatgtggaattattcttaagtaataaaacactcaaatctggatctcatgttaattctaatttaatattggcacataaaatatctgactattttcataatacttacattttaagtactaatttagctggacattggattctgattatacaacttatgaaagattctaaaggtatttttgaaaaagattggggagagggatatataactgatcatatgtttattaatttgaaagttttcttcaatgcttataagacctatctcttgtgttttcataaaggttatggcaaagcaaagctggagtgtgatatgaacacttcagatcttctatgtgtattggaattaatagacagtagttattggaagtctatgtctaaggtatttttagaacaaaaagttatcaaatacattcttagccaagatgcaagtttacatagagtaaaaggatgtcatagcttcaaattatggtttcttaaacgtcttaatgtagcagaattcacagtttgcccttgggttgttaacatagattatcatccaacacatatgaaagcaatattaacttatatagatcttgttagaatgggattgataaatatagatagaatacacattaaaaataaacacaaattcaatgatgaattttatacttctaatctcttctacattaattataacttctcagataatactcatctattaactaaacatataaggattgctaattctgaattagaaaataattacaacaaattatatcatcctacaccagaaaccctagagaatatactagccaatccgattaaaagtaatgacaaaaagacactgaatgactattgtataggtaaaaatgttgactcaataatgttaccattgttatctaataagaagcttattaaatcgtctgcaatgattagaaccaattacagcaaacaagatttgtataatttattccctatggttgtgattgatagaattatagatcattcaggcaatacagccaaatccaaccaactttacactactacttcccaccaaatatctttagtgcacaatagcacatcactttactgcatgcttccttggcatcatattaatagattcaattttgtatttagttctacaggttgtaaaattagtatagagtatattttaaaagatcttaaaattaaagatcccaattgtatagcattcataggtgaaggagcagggaatttattattgcgtacagtagtggaacttcatcctgacataagatatatttacagaagtctgaaagattgcaatgatcatagtttacctattgagtttttaaggctgtacaatggacatatcaacattgattatggtgaaaatttgaccattcctgctacagatgcaaccaacaacattcattggtcttatttacatataaagtttgctgaacctatcagtctttttgtctgtgatgccgaattgtctgtaacagtcaactggagtaaaattataatagaatggagcaagcatgtaagaaagtgcaagtactgttcctcagttaataaatgtatgttaatagtaaaatatcatgctcaagatgatattgatttcaaattagacaatataactatattaaaaacttatgtatgcttaggcagtaagttaaagggatcggaggtttacttagtccttacaataggtcctgcgaatatattcccagtatttaatgtagtacaaaatgctaaattgatactatcaagaaccaaaaatttcatcatgcctaagaaagctgataaagagtctattgatgcaaatattaaaagtttgataccctttctttgttaccctataacaaaaaaaggaattaatactgcattgtcaaaactaaagagtgttgttagtggagatatactatcatattctatagctggacgtaatgaagttttcagcaataaacttataaatcataagcatatgaacatcttaaaatggttcaatcatgttttaaatttcagatcaacagaactaaactataaccatttatatatggtagaatctacatatccttacctaagtgaattgttaaacagcttgacaaccaatgaacttaaaaaactgattaaaatcacaggtagtctgttatacaactttcataatgaataatgaataaagatcttataataaaaattcccatagctatacactaacactgtattcaattatagttattaaaaattaaaaatcgtacgattttttaaataacttttagtgaactaatcctaaagttatcattttaatcttggaggaataaatttaaaccctaatctaattggtttatatgtgtattaactaaattacgagatattagtttttgacactttttttctcgt

SEQ ID NO: 105 - DNA, 16731 bp, Artificial Sequence
  Description of Artificial Sequence: Synthetic polynucleotide
acgcgaaaaaatgcgtacaacaaacttgcataaaccaaaaaaatggggcaaataagaatttgataagtaccacttaaatttaactcccttgcttagcgatggtgagcgagctgattaaggagaacatgcacatgaagctgtacatggagggcaccgtgaacaaccaccacttcaagtgcacatccgagggcgaaggcaagccctacgagggcacccagaccatgagaatcaaggcggtcgagggcggccctctccccttcgccttcgacatcctggctaccagcttcatgtacggcagcaaaaccttcatcaaccacacccagggcatccccgacttctttaagcagtccttccccgagggcttcacatgggagagagtcaccacatacgaagacgggggcgtgctgaccgctacccaggacaccagcctccaggacggctgcctcatctacaacgtcaagatcagaggggtgaacttcccatccaacggccctgtgatgcagaagaaaacactcggctgggaggcctccaccgagaccctgtaccccgctgacggcggcctggaaggcagagccgacatggccctgaagctcgtgggcgggggccacctgatctgcaacttgaagaccacatacagatccaagaaacccgctaagaacctcaagatgcccggcgtctactatgtggacagaagactggaaagaatcaaggaggccgacaaagagacctacgtcgagcagcacgaggtggctgtggccagatactgcgacctccctagcaaactggggcacagatgagtattcaattatagttattaaaaacttaacagaagacaaaaatggggcaaataagaatttgataagtaccacttaaatttaactcccttgcttagcgatgggttcgaattcgctatcgatgataaaagtacgtctacaaaatctatttgataatgatgaagtagcgctactaaaaataacgtgttatacggataaactaatacatctaacgaatgcgctagcgaaagcggtaatacatacgataaaactaaatggtatagtatttgtacatgtaataacgtcgtcggatatatgtccgaataataatatagtagtaaaatcgaattttacgacgatgccggtactacaaaatggtggttatatatgggaaatgatggaactaacgcattgttcgcaaccgaatggtctactagatgataattgtgaaataaaattttcgaaaaaactatcggattcgacgatgacgaattatatgaatcaactatcggaactactaggttttgatctaaatccgtaaattataattaatatcaactagcaaatcaatgtcactaacaccattagttaatataaaacttaacagaagacaaaaatggggcaaataaatcaattcagccaacccaaccatggatacgacgcataatgataatacgccgcaacgtctaatgataacggatatgcgtccgctatcgctagaaacgataataacgtcgctaacgcgtgatataataacgcataaatttatatatctaataaatcatgaatgtatagtacgtaaactagatgaacgtcaagcgacgtttacgtttctagtaaattatgaaatgaaactactacataaagtaggttcgacgaaatataaaaaatatacggaatataatacgaaatatggtacgtttccgatgccgatatttataaatcatgatggttttctagaatgtataggtataaaaccgacgaaacatacgccgataatatataaatatgatctaaatccgtaaatttcaacacaatattcacacaatctaaaacaacaactctatgcataactatactccatagtccagatggagcctgaaaattatagtaatttaaaattaaggagagatataagatagaagatggggcaaatacaaagatggctcttagcaaagtcaagttgaatgatacactcaacaaagatcaacttctgtcatccagcaaatacaccatccaacggagcacaggagatagtattgatactcctaattatgatgtgcagaaacacatcaataagttatgtggcatgttattaatcacagaagatgctaatcataaattcactgggttaataggtatgttatatgcgatgtctaggttaggaagagaagacaccataaaaatactcagagatgcgggatatcatgtaaaagcaaatggagtagatgtaacaacacatcgtcaagacattaatggaaaagaaatgaaatttgaagtgttaacattggcaagcttaacaactgaaattcaaatcaacattgagatagaatctagaaaatcctacaaaaaaatgctaaaagaaatgggagaggtagctccagaatacaggcatgactctcctgattgtgggatgataatattatgtatagcagcattagtaataactaaattagcagcaggggacagatctggtcttacagccgtgattaggagagctaataatgtcctaaaaaatgaaatgaaacgttacaaaggcttactacccaaggacatagccaacagcttctatgaagtgtttgaaaaacatccccactttatagatgtttttgttcattttggtatagcacaatcttctaccagaggtggcagtagagttgaagggatttttgcaggattgtttatgaatgcctatggtgcagggcaagtgatgttacggtggggagtcttagcaaaatcagttaaaaatattatgttaggacatgctagtgtgcaagcagaaatggaacaagttgttgaggtttatgaatatgcccaaaaattgggtggtgaagcaggattctaccatatattgaacaacccaaaagcatcattattatctttgactcaatttcctcacttctccagtgtagtattaggcaatgctgctggcctaggcataatgggagagtacagaggtacaccgaggaatcaagatctatatgatgcagcaaaggcatatgctgaacaactcaaagaaaatggtgtgattaactacagtgtactagacttgacagcagaagaactagaggctatcaaacatcagcttaatccaaaagataatgatgtagagctttgagttaataaaaaatggggcaaataaatcatcatggaaaagtttgctcctgaattccatggagaagatgcaaacaacagggctactaaattcctagaatcaataaagggcaaattcacatcacccaaagatcccaagaaaaaagatagtatcatatctgtcaactcaatagatatagaagtaaccaaagaaagccctataacatcaaattcaactattatcaacccaacaaatgagacagatgatactgcagggaacaagcccaattatcaaagaaaacctctagtaagtttcaaagaagaccctacaccaagtgataatcccttttctaaactatacaaagaaaccatagaaacatttgataacaatgaagaagaatccagctattcatacgaagaaataaatgatcagacaaacgataatataacagcaagattagataggattgatgaaaaattaagtgaaatactaggaatgcttcacacattagtagtggcaagtgcaggacctacatctgctcgggatggtataagagatgccatgattggtttaagagaagaaatgatagaaaaaatcagaactgaagcattaatgaccaatgacagattagaagctatggcaagactcaggaatgaggaaagtgaaaagatggcaaaagacacatcagatgaagtgtctctcaatccaacatcagagaaattgaacaacctattggaagggaatgatagtgacaatgatctatcacttgaagatttctgattagttaccactcttcacatcaacacacaataccaacagaagaccaacaaactaaccaacccaatcatccaaccaaacatccatccgccaatcagccaaacagccaacaaaacaaccagccaatccaaaactaaccacccggaaaaaatctataatatagttacaaaaaaaggaaagggtggggcaaatatggaaacatacgtgaacaagcttcacgaaggctccacatacacagctgctgttcaatacaatgtcttagaaaaagacgatgaccctgcatcacttacaatatgggtgcccatgttccaatcatctatgccagcagatttacttataaaagaactagctaatgtcaacatactagtgaaacaaatatccacacccaagggaccttcactaagagtcatgataaactcaagaagtgcagtgctagcacaaatgcccagcaaatttaccatatgcgctaatgtgtccttggatgaaagaagcaaactagcatatgatgtaaccacaccctgtgaaatcaaggcatgtagtctaacatgcctaaaatcaaaaaatatgttgactacagttaaagatctcactatgaagacactcaaccctacacatgatattattgctttatgtgaatttgaaaacatagtaacatcaaaaaaagtcataataccaacatacctaagatccatcagtgtcagaaataaagatctgaacacacttgaaaatataacaaccactgaattcaaaaatgctatcacaaatgcaaaaatcatcccttactcaggattactattagtcatcacagtgactgacaacaaaggagcattcaaatacataaagccacaaagtcaattcatagtagatcttggagcttacctagaaaaagaaagtatatattatgttaccacaaattggaagcacacagctacacgatttgcaatcaaacccatggaagattaacctttttcctctacatcagtgtgttaattcatacaaactttctacctacattcttcacttcaccatcacaatcacaaacactctgtggttcaaccaatcaaacaaaacttatctgaagtcccagatcatcccaagtcattgtttatcagatctagtactcaaataagttaataaaaaatatacacatggacgtccatggggcaaatgcaaacatgtttgtttttcttgttttattgccactagtctctagtcagtgtgttaatcttacaaccagaactcaattaccccctgcatacactaattctttcacacgtggtgtttattaccctgacaaagttttcagatcctcagttttacattcaactcaggacttgttcttacctttcttttccaatgttacttggttccatgctatacatgtctctgggaccaatggtactaagaggtttgataaccctgtcctaccatttaatgatggtgtttattttgcttccactgagaagtctaacataataagaggctggatttttggtactactttagattcgaagacccagtccctacttattgttaataacgctactaatgttgttattaaagtctgtgaatttcaattttgtaatgatccatttttgggtgtttattaccacaaaaacaacaaaagttggatggaaagtgagttcagagtttattctagtgcgaataattgcacttttgaatatgtctctcagccttttcttatggaccttgaaggaaaacagggtaatttcaaaaatcttagggaatttgtgtttaagaatattgatggttattttaaaatatattctaagcacacgcctattaatttagtgcgtgatctccctcagggtttttcggctttagaaccattggtagatttgccaataggtattaacatcactaggtttcaaactttacttgctttacatagaagttatttgactcctggtgattcttcttcaggttggacagctggtgctgcagcttattatgtgggttatcttcaacctaggacttttctattaaaatataatgaaaatggaaccattacagatgctgtagactgtgcacttgaccctctctcagaaacaaagtgtacgttgaaatccttcactgtagaaaaaggaatctatcaaacttctaactttagagtccaaccaacagaatctattgttagatttcctaatattacaaacttgtgcccttttggtgaagtttttaacgccaccagatttgcatctgtttatgcttggaacaggaagagaatcagcaactgtgttgctgattattctgtcctatataattccgcatcattttccacttttaagtgttatggagtgtctcctactaaattaaatgatctctgctttactaatgtctatgcagattcatttgtaattagaggtgatgaagtcagacaaatcgctccagggcaaactggaaagattgctgattataattataaattaccagatgattttacaggctgcgttatagcttggaattctaacaatcttgattctaaggttggtggtaattataattacctgtatagattgtttaggaagtctaatctcaaaccttttgagagagatatttcaactgaaatctatcaggccggtagcacaccttgtaatggtgttgaaggttttaattgttactttcctttacaatcatatggtttccaacccactaatggtgttggttaccaaccatacagagtagtagtactttcttttgaacttctacatgcaccagcaactgtttgtggacctaaaaagtctactaatttggttaaaaacaaatgtgtcaatttcaacttcaatggtttaacaggcacaggtgttcttactgagtctaacaaaaagtttctgcctttccaacaatttggcagagacattgctgacactactgatgctgtccgtgatccacagacacttgagattcttgacattacaccatgttcttttggtggtgtcagtgttataacaccaggaacaaatacttctaaccaggttgctgttctttatcaggatgttaactgcacagaagtccctgttgctattcatgcagatcaacttactcctacttggcgtgtttattctacaggttctaatgtttttcaaacacgtgcaggctgtttaataggggctgaacatgtcaacaactcatatgagtgtgacatacccattggtgcaggtatatgcgctagttatcagactcagactaattctcctcggcgggcacgtagtgtagctagtcaatccatcattgcctacactatgtcacttggtgcagaaaattcagttgcttactctaataactctattgccatacccacaaattttactattagtgttaccacagaaattctaccagtgtctatgaccaagacatcagtagattgtacaatgtacatttgtggtgattcaactgaatgcagcaatcttttgttgcaatatggcagtttttgtacacaattaaaccgtgctttaactggaatagctgttgaacaagacaaaaacacccaagaagtttttgcacaagtcaaacaaatttacaaaacaccaccaattaaagattttggtggttttaatttttcacaaatattaccagatccatcaaaaccaagcaagaggtcatttattgaagatctacttttcaacaaagtgacacttgcagatgctggcttcatcaaacaatatggtgattgccttggtgatattgctgctagagacctcatttgtgcacaaaagtttaacggccttactgttttgccacctttgctcacagatgaaatgattgctcaatacacttctgcactgttagcgggtacaatcacttctggttggacctttggtgcaggtgctgcattacaaataccatttgctatgcaaatggcttataggtttaatggtattggagttacacagaatgttctctatgagaaccaaaaattgattgccaaccaatttaatagtgctattggcaaaattcaagactcactttcttccacagcaagtgcacttggaaaacttcaagatgtggtcaaccaaaatgcacaagctttaaacacgcttgttaaacaacttagctccaattttggtgcaatttcaagtgttttaaatgatatcctttcacgtcttgacaaagttgaggctgaagtgcaaattgataggttgatcacaggcagacttcaaagtttgcagacatatgtgactcaacaattaattagagctgcagaaatcagagcttctgctaatcttgctgctactaaaatgtcagagtgtgtacttggacaatcaaaaagagttgatttttgtggaaagggctatcatcttatgtccttccctcagtcagcacctcatggtgtagtcttcttgcatgtgacttatgtccctgcacaagaaaagaacttcacaactgctcctgccatttgtcatgatggaaaagcacactttcctcgtgaaggtgtctttgtttcaaatggcacacactggtttgtaacacaaaggaatttttatgaaccacaaatcattactacagacaacacatttgtgtctggtaactgtgatgttgtaataggaattgtcaacaacacagtttatgatcctttgcaacctgaattagactcattcaaggaggagttagataaatattttaagaatcatacatcaccagatgttgatttaggtgacatctctggcattaatgcttcagttgtaaacattcaaaaagaaattgaccgcctcaatgaggttgccaagaatttaaatgaatctctcatcgatctccaagaacttggaaagtatgagcagtatataaaatggccatggtacatttggctaggttttatagctggcttgattgccatagtaatggtgacaattatgctttgctgtatgaccagttgctgtagttgtctcaagggctgttgttcttgtggatcctgctgcaaatttgatgaagacgacaaggccagaagcacaccaatcacactaagcaaggatcaactgagtggtataaataatattgcatttagtaactaaataaaaatagcacctaatcatgttcttacaatggtttactatctgctcatagacaacccatctatcattggattttcttaaaatctgaacttcatcgaaactcttatctataaaccatctcacttacactatttaagtagattcctagtttatagttatataaaacacaattgaatgccagtcgaccttaccatctgtaaaaatgaaaactggggcaaatatgtcacgaaggaatccttgcaaatttgaaattcgaggtcattgcttaaatggtaagaggtgtcattttagtcataattattttgaatggccaccccatgcactgcttgtaagacaaaactttatgttaaacagaatacttaagtctatggataaaagtatagataccttatcagaaataagtggagctgcagagttggacagaacagaagagtatgctcttggtgtagttggagtgctagagagttatataggatcaataaacaatataactaaacaatcagcatgtgttgccatgagcaaactcctcactgaactcaatagtgatgatatcaaaaagctgagggacaatgaagagctaaattcacccaagataagagtgtacaatactgtcatatcatatattgaaagcaacaggaaaaacaataaacaaactatccatctgttaaaaagattgccagcagacgtattgaagaaaaccatcaaaaacacattggatatccataagagcataaccatcaacaacccaaaagaatcaactgttagtgatacaaatgaccatgccaaaaataatgatactacctgacaaatatccttgtagtataacttccatactaataacaagtagatgtagagttactatgtataatcaaaagaacacactatatttcaatcaaaacaacccaaataaccatatgtactcaccgaatcaaacattcaatgaaatccattggacctctcaagaattgattgacacaattcaaaattttctacaacatctaggtattattgaggatatatatacaatatatatattagtgtcataacactcaattctaacactcaccacatcgttacattattaattcaaacaattcaagttgtgggacaaaatggatcccattattaatggaaattctgctaatgtttatctaaccgatagttatttaaaaggtgttatctctttctcagagtgtaatgctttaggaagttacatattcaatggtccttatctcaaaaatgattataccaacttaattagtagacaaaatccattaatagaacacatgaatctaaagaaactaaatataacacagtccttaatatctaagtatcataaaggtgaaataaaattagaagaacctacttattttcagtcattacttatgacatacaagagtatgacctcgtcagaacagattgctaccactaatttacttaaaaagataataagaagagctatagaaataagtgatgtcaaagtctatgctatattgaataaactagggcttaaagaaaaggacaagattaaatccaacaatggacaagatgaagacaactcagttattacgaccataatcaaagatgatatactttcagctgttaaagataatcaatctcatcttaaagcagacaaaaatcactctacaaaacaaaaagacacaatcaaaacaacactcttgaagaaattgatgtgttcaatgcaacatcctccatcatggttaatacattggtttaacttatacacaaaattaaacaacatattaacacagtatcgatcaaatgaggtaaaaaaccatgggtttacattgatagataatcaaactcttagtggatttcaatttattttgaaccaatatggttgtatagtttatcataaggaactcaaaagaattactgtgacaacctataatcaattcttgacatggaaagatattagccttagtagattaaatgtttgtttaattacatggattagtaactgcttgaacacattaaataaaagcttaggcttaagatgcggattcaataatgttatcttgacacaactattcctttatggagattgtatactaaagctatttcacaatgaggggttctacataataaaagaggtagagggatttattatgtctctaattttaaatataacagaagaagatcaattcagaaaacgattttataatagtatgctcaacaacatcacagatgctgctaataaagctcagaaaaatctgctatcaagagtatgtcatacattattagataagacagtgtccgataatataataaatggcagatggataattctattaagtaagttccttaaattaattaagcttgcaggtgacaataaccttaacaatctgagtgaactatattttttgttcagaatatttggacacccaatggtagatgaaagacaagccatggatgctgttaaaattaattgcaatgagaccaaattttacttgttaagcagtctgagtatgttaagaggtgcctttatatatagaattataaaagggtttgtaaataattacaacagatggcctactttaagaaatgctattgttttacccttaagatggttaacttactataaactaaacacttatccttctttgttggaacttacagaaagagatttgattgtgttatcaggactacgtttctatcgtgagtttcggttgcctaaaaaagtggatcttgaaatgattataaatgataaagctatatcacctcctaaaaatttgatatggactagtttccctagaaattacatgccatcacacatacaaaactatatagaacatgaaaaattaaaattttccgagagtgataaatcaagaagagtattagagtattatttaagagataacaaattcaatgaatgtgatttatacaactgtgtagttaatcaaagttatctcaacaaccctaatcatgtggtatcattgacaggcaaagaaagagaactcagtgtaggtagaatgtttgcaatgcaaccgggaatgttcagacaggttcaaatattggcagagaaaatgatagctgaaaacattttacaattctttcctgaaagtcttacaagatatggtgatctagaactacaaaaaatattagaattgaaagcaggaataagtaacaaatcaaatcgctacaatgataattacaacaattacattagtaagtgctctatcatcacagatctcagcaaattcaatcaagcatttcgatatgaaacgtcatgtatttgtagtgatgtgctggatgaactgcatggtgtacaatctctattttcctggttacatttaactattcctcatgtcacaataatatgcacatataggcatgcacccccctatataggagatcatattgtagatcttaacaatgtagatgaacaaagtggattatatagatatcacatgggtggcatcgaagggtggtgtcaaaaactgtggaccatagaagctatatcactattggatctaatatctctcaaagggaaattctcaattactgctttaattaatggtgacaatcaatcaatagatataagcaaaccaatcagactcatggaaggtcaaactcatgctcaagcagattatttgctagcattaaatagccttaaattactgtataaagagtatgcaggcataggccacaaattaaaaggaactgagacttatatatcacgagatatgcaatttatgagtaaaacaattcaacataacggtgtatattacccagctagtataaagaaagtcctaagagtgggaccgtggataaacactatacttgatgatttcaaagtgagtctagaatctataggtagtttgacacaagaattagaatatagaggtgaaagtctattatgcagtttaatatttagaaatgtatggttatataatcagattgctctacaattaaaaaatcatgcattatgtaacaataaactatatttggacatattaaaggttctgaaacacttaaaaaccttttttaatcttgataatattgatacagcattaacattgtatatgaatttacccatgttatttggtggtggtgatcccaacttgttatatcgaagtttctatagaagaactcctgacttcctcacagaggctatagttcactctgtgttcatacttagttattatacaaaccatgacttaaaagataaacttcaagatctgtcagatgatagattgaataagttcttaacatgcataatcacgtttgacaaaaaccctaatgctgaattcgtaacattgatgagagatcctcaagctttagggtctgagagacaagctaaaattactagcgaaatcaatagactggcagttacagaggttttgagtacagctccaaacaaaatattctccaaaagtgcacaacattatactactacagagatagatctaaatgatattatgcaaaatatagaacctacatatcctcatgggctaagagttgtttatgaaagtttacccttttataaagcagagaaaatagtaaatcttatatcaggtacaaaatctataactaacatactggaaaaaacttctgccatagacttaacagatattgatagagccactgagatgatgaggaaaaacataactttgcttataaggatacttccattggattgtaacagagataaaagagagatattgagtatggaaaacctaagtattactgaattaagcaaatatgttagggaaagatcttggtctttatccaatatagttggtgttacatcacccagtatcatgtatacaatggacatcaaatatactacaagcactatatctagtggcataattatagagaaatataatgttaacagtttaacacgtggtgagagaggacccactaaaccatgggttggttcatctacacaagagaaaaaaacaatgccagtttataatagacaagtcttaaccaaaaaacagagagatcaaatagatctattagcaaaattggattgggtgtatgcatctatagataacaaggatgaattcatggaagaactcagcataggaacccttgggttaacatatgaaaaggccaagaaattatttccacaatatttaagtgtcaattatttgcatcgccttacagtcagtagtagaccatgtgaattccctgcatcaataccagcttatagaacaacaaattatcactttgacactagccctattaatcgcatattaacagaaaagtatggtgatgaagatattgacatagtattccaaaactgtataagctttggccttagtttaatgtcagtagtagaacaatttactaatgtatgtcctaacagaattattctcatacctaagcttaatgagatacatttgatgaaacctcccatattcacaggtgatgttgatattcacaagttaaaacaagtgatacaaaaacagcatatgtttttaccagacaaaataagtttgactcaatatgtggaattattcttaagtaataaaacactcaaatctggatctcatgttaattctaatttaatattggcacataaaatatctgactattttcataatacttacattttaagtactaatttagctggacattggattctgattatacaacttatgaaagattctaaaggtatttttgaaaaagattggggagagggatatataactgatcatatgtttattaatttgaaagttttcttcaatgcttataagacctatctcttgtgttttcataaaggttatggcaaagcaaagctggagtgtgatatgaacacttcagatcttctatgtgtattggaattaatagacagtagttattggaagtctatgtctaaggtatttttagaacaaaaagttatcaaatacattcttagccaagatgcaagtttacatagagtaaaaggatgtcatagcttcaaattatggtttcttaaacgtcttaatgtagcagaattcacagtttgcccttgggttgttaacatagattatcatccaacacatatgaaagcaatattaacttatatagatcttgttagaatgggattgataaatatagatagaatacacattaaaaataaacacaaattcaatgatgaattttatacttctaatctcttctacattaattataacttctcagataatactcatctattaactaaacatataaggattgctaattctgaattagaaaataattacaacaaattatatcatcctacaccagaaaccctagagaatatactagccaatccgattaaaagtaatgacaaaaagacactgaatgactattgtataggtaaaaatgttgactcaataatgttaccattgttatctaataagaagcttattaaatcgtctgcaatgattagaaccaattacagcaaacaagatttgtataatttattccctatggttgtgattgatagaattatagatcattcaggcaatacagccaaatccaaccaactttacactactacttcccaccaaatatctttagtgcacaatagcacatcactttactgcatgcttccttggcatcatattaatagattcaattttgtatttagttctacaggttgtaaaattagtatagagtatattttaaaagatcttaaaattaaagatcccaattgtatagcattcataggtgaaggagcagggaatttattattgcgtacagtagtggaacttcatcctgacataagatatatttacagaagtctgaaagattgcaatgatcatagtttacctattgagtttttaaggctgtacaatggacatatcaacattgattatggtgaaaatttgaccattcctgctacagatgcaaccaacaacattcattggtcttatttacatataaagtttgctgaacctatcagtctttttgtctgtgatgccgaattgtctgtaacagtcaactggagtaaaattataatagaatggagcaagcatgtaagaaagtgcaagtactgttcctcagttaataaatgtatgttaatagtaaaatatcatgctcaagatgatattgatttcaaattagacaatataactatattaaaaacttatgtatgcttaggcagtaagttaaagggatcggaggtttacttagtccttacaataggtcctgcgaatatattcccagtatttaatgtagtacaaaatgctaaattgatactatcaagaaccaaaaatttcatcatgcctaagaaagctgataaagagtctattgatgcaaatattaaaagtttgataccctttctttgttaccctataacaaaaaaaggaattaatactgcattgtcaaaactaaagagtgttgttagtggagatatactatcatattctatagctggacgtaatgaagttttcagcaataaacttataaatcataagcatatgaacatcttaaaatggttcaatcatgttttaaatttcagatcaacagaactaaactataaccatttatatatggtagaatctacatatccttacctaagtgaattgttaaacagcttgacaaccaatgaacttaaaaaactgattaaaatcacaggtagtctgttatacaactttcataatgaataatgaataaagatcttataataaaaattcccatagctatacactaacactgtattcaattatagttattaaaaattaaaaatcgtacgattttttaaataacttttagtgaactaatcctaaagttatcattttaatcttggaggaataaatttaaaccctaatctaattggtttatatgtgtattaactaaattacgagatattagtttttgacactttttttctcgt

SEQ ID NO: 106 - DNA, 16749 bp, Artificial Sequence
  Description of Artificial Sequence: Synthetic polynucleotide
acgcgaaaaaatgcgtacaacaaacttgcataaaccaaaaaaatggggcaaataagaatttgataagtaccacttaaatttaactcccttgcttagcgatggtgagcgagctgattaaggagaacatgcacatgaagctgtacatggagggcaccgtgaacaaccaccacttcaagtgcacatccgagggcgaaggcaagccctacgagggcacccagaccatgagaatcaaggcggtcgagggcggccctctccccttcgccttcgacatcctggctaccagcttcatgtacggcagcaaaaccttcatcaaccacacccagggcatccccgacttctttaagcagtccttccccgagggcttcacatgggagagagtcaccacatacgaagacgggggcgtgctgaccgctacccaggacaccagcctccaggacggctgcctcatctacaacgtcaagatcagaggggtgaacttcccatccaacggccctgtgatgcagaagaaaacactcggctgggaggcctccaccgagaccctgtaccccgctgacggcggcctggaaggcagagccgacatggccctgaagctcgtgggcgggggccacctgatctgcaacttgaagaccacatacagatccaagaaacccgctaagaacctcaagatgcccggcgtctactatgtggacagaagactggaaagaatcaaggaggccgacaaagagacctacgtcgagcagcacgaggtggctgtggccagatactgcgacctccctagcaaactggggcacagatgagtattcaattatagttattaaaaacttaacagaagacaaaaatggggcaaataagaatttgataagtaccacttaaatttaactcccttgcttagcgatgggttcgaattcgctatcgatgataaaagtacgtctacaaaatctatttgataatgatgaagtagcgctactaaaaataacgtgttatacggataaactaatacatctaacgaatgcgctagcgaaagcggtaatacatacgataaaactaaatggtatagtatttgtacatgtaataacgtcgtcggatatatgtccgaataataatatagtagtaaaatcgaattttacgacgatgccggtactacaaaatggtggttatatatgggaaatgatggaactaacgcattgttcgcaaccgaatggtctactagatgataattgtgaaataaaattttcgaaaaaactatcggattcgacgatgacgaattatatgaatcaactatcggaactactaggttttgatctaaatccgtaaattataattaatatcaactagcaaatcaatgtcactaacaccattagttaatataaaacttaacagaagacaaaaatggggcaaataaatcaattcagccaacccaaccatggatacgacgcataatgataatacgccgcaacgtctaatgataacggatatgcgtccgctatcgctagaaacgataataacgtcgctaacgcgtgatataataacgcataaatttatatatctaataaatcatgaatgtatagtacgtaaactagatgaacgtcaagcgacgtttacgtttctagtaaattatgaaatgaaactactacataaagtaggttcgacgaaatataaaaaatatacggaatataatacgaaatatggtacgtttccgatgccgatatttataaatcatgatggttttctagaatgtataggtataaaaccgacgaaacatacgccgataatatataaatatgatctaaatccgtaaatttcaacacaatattcacacaatctaaaacaacaactctatgcataactatactccatagtccagatggagcctgaaaattatagtaatttaaaattaaggagagatataagatagaagatggggcaaatacaaagatggctcttagcaaagtcaagttgaatgatacactcaacaaagatcaacttctgtcatccagcaaatacaccatccaacggagcacaggagatagtattgatactcctaattatgatgtgcagaaacacatcaataagttatgtggcatgttattaatcacagaagatgctaatcataaattcactgggttaataggtatgttatatgcgatgtctaggttaggaagagaagacaccataaaaatactcagagatgcgggatatcatgtaaaagcaaatggagtagatgtaacaacacatcgtcaagacattaatggaaaagaaatgaaatttgaagtgttaacattggcaagcttaacaactgaaattcaaatcaacattgagatagaatctagaaaatcctacaaaaaaatgctaaaagaaatgggagaggtagctccagaatacaggcatgactctcctgattgtgggatgataatattatgtatagcagcattagtaataactaaattagcagcaggggacagatctggtcttacagccgtgattaggagagctaataatgtcctaaaaaatgaaatgaaacgttacaaaggcttactacccaaggacatagccaacagcttctatgaagtgtttgaaaaacatccccactttatagatgtttttgttcattttggtatagcacaatcttctaccagaggtggcagtagagttgaagggatttttgcaggattgtttatgaatgcctatggtgcagggcaagtgatgttacggtggggagtcttagcaaaatcagttaaaaatattatgttaggacatgctagtgtgcaagcagaaatggaacaagttgttgaggtttatgaatatgcccaaaaattgggtggtgaagcaggattctaccatatattgaacaacccaaaagcatcattattatctttgactcaatttcctcacttctccagtgtagtattaggcaatgctgctggcctaggcataatgggagagtacagaggtacaccgaggaatcaagatctatatgatgcagcaaaggcatatgctgaacaactcaaagaaaatggtgtgattaactacagtgtactagacttgacagcagaagaactagaggctatcaaacatcagcttaatccaaaagataatgatgtagagctttgagttaataaaaaatggggcaaataaatcatcatggaaaagtttgctcctgaattccatggagaagatgcaaacaacagggctactaaattcctagaatcaataaagggcaaattcacatcacccaaagatcccaagaaaaaagatagtatcatatctgtcaactcaatagatatagaagtaaccaaagaaagccctataacatcaaattcaactattatcaacccaacaaatgagacagatgatactgcagggaacaagcccaattatcaaagaaaacctctagtaagtttcaaagaagaccctacaccaagtgataatcccttttctaaactatacaaagaaaccatagaaacatttgataacaatgaagaagaatccagctattcatacgaagaaataaatgatcagacaaacgataatataacagcaagattagataggattgatgaaaaattaagtgaaatactaggaatgcttcacacattagtagtggcaagtgcaggacctacatctgctcgggatggtataagagatgccatgattggtttaagagaagaaatgatagaaaaaatcagaactgaagcattaatgaccaatgacagattagaagctatggcaagactcaggaatgaggaaagtgaaaagatggcaaaagacacatcagatgaagtgtctctcaatccaacatcagagaaattgaacaacctattggaagggaatgatagtgacaatgatctatcacttgaagatttctgattagttaccactcttcacatcaacacacaataccaacagaagaccaacaaactaaccaacccaatcatccaaccaaacatccatccgccaatcagccaaacagccaacaaaacaaccagccaatccaaaactaaccacccggaaaaaatctataatatagttacaaaaaaaggaaagggtggggcaaatatggaaacatacgtgaacaagcttcacgaaggctccacatacacagctgctgttcaatacaatgtcttagaaaaagacgatgaccctgcatcacttacaatatgggtgcccatgttccaatcatctatgccagcagatttacttataaaagaactagctaatgtcaacatactagtgaaacaaatatccacacccaagggaccttcactaagagtcatgataaactcaagaagtgcagtgctagcacaaatgcccagcaaatttaccatatgcgctaatgtgtccttggatgaaagaagcaaactagcatatgatgtaaccacaccctgtgaaatcaaggcatgtagtctaacatgcctaaaatcaaaaaatatgttgactacagttaaagatctcactatgaagacactcaaccctacacatgatattattgctttatgtgaatttgaaaacatagtaacatcaaaaaaagtcataataccaacatacctaagatccatcagtgtcagaaataaagatctgaacacacttgaaaatataacaaccactgaattcaaaaatgctatcacaaatgcaaaaatcatcccttactcaggattactattagtcatcacagtgactgacaacaaaggagcattcaaatacataaagccacaaagtcaattcatagtagatcttggagcttacctagaaaaagaaagtatatattatgttaccacaaattggaagcacacagctacacgatttgcaatcaaacccatggaagattaacctttttcctctacatcagtgtgttaattcatacaaactttctacctacattcttcacttcaccatcacaatcacaaacactctgtggttcaaccaatcaaacaaaacttatctgaagtcccagatcatcccaagtcattgtttatcagatctagtactcaaataagttaataaaaaatatacacatggacgtccatggggcaaatgcaaacatgtttgtttttcttgttttattgccactagtctctagtcagtgtgttaatcttacaaccagaactcaattaccccctgcatacactaattctttcacacgtggtgtttattaccctgacaaagttttcagatcctcagttttacattcaactcaggacttgttcttacctttcttttccaatgttacttggttccatgctatacatgtctctgggaccaatggtactaagaggtttgataaccctgtcctaccatttaatgatggtgtttattttgcttccactgagaagtctaacataataagaggctggatttttggtactactttagattcgaagacccagtccctacttattgttaataacgctactaatgttgttattaaagtctgtgaatttcaattttgtaatgatccatttttgggtgtttattaccacaaaaacaacaaaagttggatggaaagtgagttcagagtttattctagtgcgaataattgcacttttgaatatgtctctcagccttttcttatggaccttgaaggaaaacagggtaatttcaaaaatcttagggaatttgtgtttaagaatattgatggttattttaaaatatattctaagcacacgcctattaatttagtgcgtgatctccctcagggtttttcggctttagaaccattggtagatttgccaataggtattaacatcactaggtttcaaactttacttgctttacatagaagttatttgactcctggtgattcttcttcaggttggacagctggtgctgcagcttattatgtgggttatcttcaacctaggacttttctattaaaatataatgaaaatggaaccattacagatgctgtagactgtgcacttgaccctctctcagaaacaaagtgtacgttgaaatccttcactgtagaaaaaggaatctatcaaacttctaactttagagtccaaccaacagaatctattgttagatttcctaatattacaaacttgtgcccttttggtgaagtttttaacgccaccagatttgcatctgtttatgcttggaacaggaagagaatcagcaactgtgttgctgattattctgtcctatataattccgcatcattttccacttttaagtgttatggagtgtctcctactaaattaaatgatctctgctttactaatgtctatgcagattcatttgtaattagaggtgatgaagtcagacaaatcgctccagggcaaactggaaagattgctgattataattataaattaccagatgattttacaggctgcgttatagcttggaattctaacaatcttgattctaaggttggtggtaattataattacctgtatagattgtttaggaagtctaatctcaaaccttttgagagagatatttcaactgaaatctatcaggccggtagcacaccttgtaatggtgttgaaggttttaattgttactttcctttacaatcatatggtttccaacccactaatggtgttggttaccaaccatacagagtagtagtactttcttttgaacttctacatgcaccagcaactgtttgtggacctaaaaagtctactaatttggttaaaaacaaatgtgtcaatttcaacttcaatggtttaacaggcacaggtgttcttactgagtctaacaaaaagtttctgcctttccaacaatttggcagagacattgctgacactactgatgctgtccgtgatccacagacacttgagattcttgacattacaccatgttcttttggtggtgtcagtgttataacaccaggaacaaatacttctaaccaggttgctgttctttatcaggatgttaactgcacagaagtccctgttgctattcatgcagatcaacttactcctacttggcgtgtttattctacaggttctaatgtttttcaaacacgtgcaggctgtttaataggggctgaacatgtcaacaactcatatgagtgtgacatacccattggtgcaggtatatgcgctagttatcagactcagactaattctcctcggcgggcacgtagtgtagctagtcaatccatcattgcctacactatgtcacttggtgcagaaaattcagttgcttactctaataactctattgccatacccacaaattttactattagtgttaccacagaaattctaccagtgtctatgaccaagacatcagtagattgtacaatgtacatttgtggtgattcaactgaatgcagcaatcttttgttgcaatatggcagtttttgtacacaattaaaccgtgctttaactggaatagctgttgaacaagacaaaaacacccaagaagtttttgcacaagtcaaacaaatttacaaaacaccaccaattaaagattttggtggttttaatttttcacaaatattaccagatccatcaaaaccaagcaagaggtcatttattgaagatctacttttcaacaaagtgacacttgcagatgctggcttcatcaaacaatatggtgattgccttggtgatattgctgctagagacctcatttgtgcacaaaagtttaacggccttactgttttgccacctttgctcacagatgaaatgattgctcaatacacttctgcactgttagcgggtacaatcacttctggttggacctttggtgcaggtgctgcattacaaataccatttgctatgcaaatggcttataggtttaatggtattggagttacacagaatgttctctatgagaaccaaaaattgattgccaaccaatttaatagtgctattggcaaaattcaagactcactttcttccacagcaagtgcacttggaaaacttcaagatgtggtcaaccaaaatgcacaagctttaaacacgcttgttaaacaacttagctccaattttggtgcaatttcaagtgttttaaatgatatcctttcacgtcttgacaaagttgaggctgaagtgcaaattgataggttgatcacaggcagacttcaaagtttgcagacatatgtgactcaacaattaattagagctgcagaaatcagagcttctgctaatcttgctgctactaaaatgtcagagtgtgtacttggacaatcaaaaagagttgatttttgtggaaagggctatcatcttatgtccttccctcagtcagcacctcatggtgtagtcttcttgcatgtgacttatgtccctgcacaagaaaagaacttcacaactgctcctgccatttgtcatgatggaaaagcacactttcctcgtgaaggtgtctttgtttcaaatggcacacactggtttgtaacacaaaggaatttttatgaaccacaaatcattactacagacaacacatttgtgtctggtaactgtgatgttgtaataggaattgtcaacaacacagtttatgatcctttgcaacctgaattagactcattcaaggaggagttagataaatattttaagaatcatacatcaccagatgttgatttaggtgacatctctggcattaatgcttcagttgtaaacattcaaaaagaaattgaccgcctcaatgaggttgccaagaatttaaatgaatctctcatcgatctccaagaacttggaaagtatgagcagtatataaaatggccatggtacatttggctaggttttatagctggcttgattgccatagtaatggtgacaattatgctttgctgtatgaccagttgctgtagttgtctcaagggctgttgttcttgtggatcctgctgcaaatttgatgaagacgacggactgctcctatactgtaaggccagaagcacaccaatcacactaagcaaggatcaactgagtggtataaataatattgcatttagtaactaaataaaaatagcacctaatcatgttcttacaatggtttactatctgctcatagacaacccatctatcattggattttcttaaaatctgaacttcatcgaaactcttatctataaaccatctcacttacactatttaagtagattcctagtttatagttatataaaacacaattgaatgccagtcgaccttaccatctgtaaaaatgaaaactggggcaaatatgtcacgaaggaatccttgcaaatttgaaattcgaggtcattgcttaaatggtaagaggtgtcattttagtcataattattttgaatggccaccccatgcactgcttgtaagacaaaactttatgttaaacagaatacttaagtctatggataaaagtatagataccttatcagaaataagtggagctgcagagttggacagaacagaagagtatgctcttggtgtagttggagtgctagagagttatataggatcaataaacaatataactaaacaatcagcatgtgttgccatgagcaaactcctcactgaactcaatagtgatgatatcaaaaagctgagggacaatgaagagctaaattcacccaagataagagtgtacaatactgtcatatcatatattgaaagcaacaggaaaaacaataaacaaactatccatctgttaaaaagattgccagcagacgtattgaagaaaaccatcaaaaacacattggatatccataagagcataaccatcaacaacccaaaagaatcaactgttagtgatacaaatgaccatgccaaaaataatgatactacctgacaaatatccttgtagtataacttccatactaataacaagtagatgtagagttactatgtataatcaaaagaacacactatatttcaatcaaaacaacccaaataaccatatgtactcaccgaatcaaacattcaatgaaatccattggacctctcaagaattgattgacacaattcaaaattttctacaacatctaggtattattgaggatatatatacaatatatatattagtgtcataacactcaattctaacactcaccacatcgttacattattaattcaaacaattcaagttgtgggacaaaatggatcccattattaatggaaattctgctaatgtttatctaaccgatagttatttaaaaggtgttatctctttctcagagtgtaatgctttaggaagttacatattcaatggtccttatctcaaaaatgattataccaacttaattagtagacaaaatccattaatagaacacatgaatctaaagaaactaaatataacacagtccttaatatctaagtatcataaaggtgaaataaaattagaagaacctacttattttcagtcattacttatgacatacaagagtatgacctcgtcagaacagattgctaccactaatttacttaaaaagataataagaagagctatagaaataagtgatgtcaaagtctatgctatattgaataaactagggcttaaagaaaaggacaagattaaatccaacaatggacaagatgaagacaactcagttattacgaccataatcaaagatgatatactttcagctgttaaagataatcaatctcatcttaaagcagacaaaaatcactctacaaaacaaaaagacacaatcaaaacaacactcttgaagaaattgatgtgttcaatgcaacatcctccatcatggttaatacattggtttaacttatacacaaaattaaacaacatattaacacagtatcgatcaaatgaggtaaaaaaccatgggtttacattgatagataatcaaactcttagtggatttcaatttattttgaaccaatatggttgtatagtttatcataaggaactcaaaagaattactgtgacaacctataatcaattcttgacatggaaagatattagccttagtagattaaatgtttgtttaattacatggattagtaactgcttgaacacattaaataaaagcttaggcttaagatgcggattcaataatgttatcttgacacaactattcctttatggagattgtatactaaagctatttcacaatgaggggttctacataataaaagaggtagagggatttattatgtctctaattttaaatataacagaagaagatcaattcagaaaacgattttataatagtatgctcaacaacatcacagatgctgctaataaagctcagaaaaatctgctatcaagagtatgtcatacattattagataagacagtgtccgataatataataaatggcagatggataattctattaagtaagttccttaaattaattaagcttgcaggtgacaataaccttaacaatctgagtgaactatattttttgttcagaatatttggacacccaatggtagatgaaagacaagccatggatgctgttaaaattaattgcaatgagaccaaattttacttgttaagcagtctgagtatgttaagaggtgcctttatatatagaattataaaagggtttgtaaataattacaacagatggcctactttaagaaatgctattgttttacccttaagatggttaacttactataaactaaacacttatccttctttgttggaacttacagaaagagatttgattgtgttatcaggactacgtttctatcgtgagtttcggttgcctaaaaaagtggatcttgaaatgattataaatgataaagctatatcacctcctaaaaatttgatatggactagtttccctagaaattacatgccatcacacatacaaaactatatagaacatgaaaaattaaaattttccgagagtgataaatcaagaagagtattagagtattatttaagagataacaaattcaatgaatgtgatttatacaactgtgtagttaatcaaagttatctcaacaaccctaatcatgtggtatcattgacaggcaaagaaagagaactcagtgtaggtagaatgtttgcaatgcaaccgggaatgttcagacaggttcaaatattggcagagaaaatgatagctgaaaacattttacaattctttcctgaaagtcttacaagatatggtgatctagaactacaaaaaatattagaattgaaagcaggaataagtaacaaatcaaatcgctacaatgataattacaacaattacattagtaagtgctctatcatcacagatctcagcaaattcaatcaagcatttcgatatgaaacgtcatgtatttgtagtgatgtgctggatgaactgcatggtgtacaatctctattttcctggttacatttaactattcctcatgtcacaataatatgcacatataggcatgcacccccctatataggagatcatattgtagatcttaacaatgtagatgaacaaagtggattatatagatatcacatgggtggcatcgaagggtggtgtcaaaaactgtggaccatagaagctatatcactattggatctaatatctctcaaagggaaattctcaattactgctttaattaatggtgacaatcaatcaatagatataagcaaaccaatcagactcatggaaggtcaaactcatgctcaagcagattatttgctagcattaaatagccttaaattactgtataaagagtatgcaggcataggccacaaattaaaaggaactgagacttatatatcacgagatatgcaatttatgagtaaaacaattcaacataacggtgtatattacccagctagtataaagaaagtcctaagagtgggaccgtggataaacactatacttgatgatttcaaagtgagtctagaatctataggtagtttgacacaagaattagaatatagaggtgaaagtctattatgcagtttaatatttagaaatgtatggttatataatcagattgctctacaattaaaaaatcatgcattatgtaacaataaactatatttggacatattaaaggttctgaaacacttaaaaaccttttttaatcttgataatattgatacagcattaacattgtatatgaatttacccatgttatttggtggtggtgatcccaacttgttatatcgaagtttctatagaagaactcctgacttcctcacagaggctatagttcactctgtgttcatacttagttattatacaaaccatgacttaaaagataaacttcaagatctgtcagatgatagattgaataagttcttaacatgcataatcacgtttgacaaaaaccctaatgctgaattcgtaacattgatgagagatcctcaagctttagggtctgagagacaagctaaaattactagcgaaatcaatagactggcagttacagaggttttgagtacagctccaaacaaaatattctccaaaagtgcacaacattatactactacagagatagatctaaatgatattatgcaaaatatagaacctacatatcctcatgggctaagagttgtttatgaaagtttacccttttataaagcagagaaaatagtaaatcttatatcaggtacaaaatctataactaacatactggaaaaaacttctgccatagacttaacagatattgatagagccactgagatgatgaggaaaaacataactttgcttataaggatacttccattggattgtaacagagataaaagagagatattgagtatggaaaacctaagtattactgaattaagcaaatatgttagggaaagatcttggtctttatccaatatagttggtgttacatcacccagtatcatgtatacaatggacatcaaatatactacaagcactatatctagtggcataattatagagaaatataatgttaacagtttaacacgtggtgagagaggacccactaaaccatgggttggttcatctacacaagagaaaaaaacaatgccagtttataatagacaagtcttaaccaaaaaacagagagatcaaatagatctattagcaaaattggattgggtgtatgcatctatagataacaaggatgaattcatggaagaactcagcataggaacccttgggttaacatatgaaaaggccaagaaattatttccacaatatttaagtgtcaattatttgcatcgccttacagtcagtagtagaccatgtgaattccctgcatcaataccagcttatagaacaacaaattatcactttgacactagccctattaatcgcatattaacagaaaagtatggtgatgaagatattgacatagtattccaaaactgtataagctttggccttagtttaatgtcagtagtagaacaatttactaatgtatgtcctaacagaattattctcatacctaagcttaatgagatacatttgatgaaacctcccatattcacaggtgatgttgatattcacaagttaaaacaagtgatacaaaaacagcatatgtttttaccagacaaaataagtttgactcaatatgtggaattattcttaagtaataaaacactcaaatctggatctcatgttaattctaatttaatattggcacataaaatatctgactattttcataatacttacattttaagtactaatttagctggacattggattctgattatacaacttatgaaagattctaaaggtatttttgaaaaagattggggagagggatatataactgatcatatgtttattaatttgaaagttttcttcaatgcttataagacctatctcttgtgttttcataaaggttatggcaaagcaaagctggagtgtgatatgaacacttcagatcttctatgtgtattggaattaatagacagtagttattggaagtctatgtctaaggtatttttagaacaaaaagttatcaaatacattcttagccaagatgcaagtttacatagagtaaaaggatgtcatagcttcaaattatggtttcttaaacgtcttaatgtagcagaattcacagtttgcccttgggttgttaacatagattatcatccaacacatatgaaagcaatattaacttatatagatcttgttagaatgggattgataaatatagatagaatacacattaaaaataaacacaaattcaatgatgaattttatacttctaatctcttctacattaattataacttctcagataatactcatctattaactaaacatataaggattgctaattctgaattagaaaataattacaacaaattatatcatcctacaccagaaaccctagagaatatactagccaatccgattaaaagtaatgacaaaaagacactgaatgactattgtataggtaaaaatgttgactcaataatgttaccattgttatctaataagaagcttattaaatcgtctgcaatgattagaaccaattacagcaaacaagatttgtataatttattccctatggttgtgattgatagaattatagatcattcaggcaatacagccaaatccaaccaactttacactactacttcccaccaaatatctttagtgcacaatagcacatcactttactgcatgcttccttggcatcatattaatagattcaattttgtatttagttctacaggttgtaaaattagtatagagtatattttaaaagatcttaaaattaaagatcccaattgtatagcattcataggtgaaggagcagggaatttattattgcgtacagtagtggaacttcatcctgacataagatatatttacagaagtctgaaagattgcaatgatcatagtttacctattgagtttttaaggctgtacaatggacatatcaacattgattatggtgaaaatttgaccattcctgctacagatgcaaccaacaacattcattggtcttatttacatataaagtttgctgaacctatcagtctttttgtctgtgatgccgaattgtctgtaacagtcaactggagtaaaattataatagaatggagcaagcatgtaagaaagtgcaagtactgttcctcagttaataaatgtatgttaatagtaaaatatcatgctcaagatgatattgatttcaaattagacaatataactatattaaaaacttatgtatgcttaggcagtaagttaaagggatcggaggtttacttagtccttacaataggtcctgcgaatatattcccagtatttaatgtagtacaaaatgctaaattgatactatcaagaaccaaaaatttcatcatgcctaagaaagctgataaagagtctattgatgcaaatattaaaagtttgataccctttctttgttaccctataacaaaaaaaggaattaatactgcattgtcaaaactaaagagtgttgttagtggagatatactatcatattctatagctggacgtaatgaagttttcagcaataaacttataaatcataagcatatgaacatcttaaaatggttcaatcatgttttaaatttcagatcaacagaactaaactataaccatttatatatggtagaatctacatatccttacctaagtgaattgttaaacagcttgacaaccaatgaacttaaaaaactgattaaaatcacaggtagtctgttatacaactttcataatgaataatgaataaagatcttataataaaaattcccatagctatacactaacactgtattcaattatagttattaaaaattaaaaatcgtacgattttttaaataacttttagtgaactaatcctaaagttatcattttaatcttggaggaataaatttaaaccctaatctaattggtttatatgtgtattaactaaattacgagatattagtttttgacactttttttctcgt

SEQ ID NO: 107 - DNA, 16704 bp, Artificial Sequence
  Description of Artificial Sequence: Synthetic polynucleotide
acgcgaaaaaatgcgtacaacaaacttgcataaaccaaaaaaatggggcaaataagaatttgataagtaccacttaaatttaactcccttgcttagcgatggtgagcgagctgattaaggagaacatgcacatgaagctgtacatggagggcaccgtgaacaaccaccacttcaagtgcacatccgagggcgaaggcaagccctacgagggcacccagaccatgagaatcaaggcggtcgagggcggccctctccccttcgccttcgacatcctggctaccagcttcatgtacggcagcaaaaccttcatcaaccacacccagggcatccccgacttctttaagcagtccttccccgagggcttcacatgggagagagtcaccacatacgaagacgggggcgtgctgaccgctacccaggacaccagcctccaggacggctgcctcatctacaacgtcaagatcagaggggtgaacttcccatccaacggccctgtgatgcagaagaaaacactcggctgggaggcctccaccgagaccctgtaccccgctgacggcggcctggaaggcagagccgacatggccctgaagctcgtgggcgggggccacctgatctgcaacttgaagaccacatacagatccaagaaacccgctaagaacctcaagatgcccggcgtctactatgtggacagaagactggaaagaatcaaggaggccgacaaagagacctacgtcgagcagcacgaggtggctgtggccagatactgcgacctccctagcaaactggggcacagatgagtattcaattatagttattaaaaacttaacagaagacaaaaatggggcaaataagaatttgataagtaccacttaaatttaactcccttgcttagcgatgggttcgaattcgctatcgatgataaaagtacgtctacaaaatctatttgataatgatgaagtagcgctactaaaaataacgtgttatacggataaactaatacatctaacgaatgcgctagcgaaagcggtaatacatacgataaaactaaatggtatagtatttgtacatgtaataacgtcgtcggatatatgtccgaataataatatagtagtaaaatcgaattttacgacgatgccggtactacaaaatggtggttatatatgggaaatgatggaactaacgcattgttcgcaaccgaatggtctactagatgataattgtgaaataaaattttcgaaaaaactatcggattcgacgatgacgaattatatgaatcaactatcggaactactaggttttgatctaaatccgtaaattataattaatatcaactagcaaatcaatgtcactaacaccattagttaatataaaacttaacagaagacaaaaatggggcaaataaatcaattcagccaacccaaccatggatacgacgcataatgataatacgccgcaacgtctaatgataacggatatgcgtccgctatcgctagaaacgataataacgtcgctaacgcgtgatataataacgcataaatttatatatctaataaatcatgaatgtatagtacgtaaactagatgaacgtcaagcgacgtttacgtttctagtaaattatgaaatgaaactactacataaagtaggttcgacgaaatataaaaaatatacggaatataatacgaaatatggtacgtttccgatgccgatatttataaatcatgatggttttctagaatgtataggtataaaaccgacgaaacatacgccgataatatataaatatgatctaaatccgtaaatttcaacacaatattcacacaatctaaaacaacaactctatgcataactatactccatagtccagatggagcctgaaaattatagtaatttaaaattaaggagagatataagatagaagatggggcaaatacaaagatggctcttagcaaagtcaagttgaatgatacactcaacaaagatcaacttctgtcatccagcaaatacaccatccaacggagcacaggagatagtattgatactcctaattatgatgtgcagaaacacatcaataagttatgtggcatgttattaatcacagaagatgctaatcataaattcactgggttaataggtatgttatatgcgatgtctaggttaggaagagaagacaccataaaaatactcagagatgcgggatatcatgtaaaagcaaatggagtagatgtaacaacacatcgtcaagacattaatggaaaagaaatgaaatttgaagtgttaacattggcaagcttaacaactgaaattcaaatcaacattgagatagaatctagaaaatcctacaaaaaaatgctaaaagaaatgggagaggtagctccagaatacaggcatgactctcctgattgtgggatgataatattatgtatagcagcattagtaataactaaattagcagcaggggacagatctggtcttacagccgtgattaggagagctaataatgtcctaaaaaatgaaatgaaacgttacaaaggcttactacccaaggacatagccaacagcttctatgaagtgtttgaaaaacatccccactttatagatgtttttgttcattttggtatagcacaatcttctaccagaggtggcagtagagttgaagggatttttgcaggattgtttatgaatgcctatggtgcagggcaagtgatgttacggtggggagtcttagcaaaatcagttaaaaatattatgttaggacatgctagtgtgcaagcagaaatggaacaagttgttgaggtttatgaatatgcccaaaaattgggtggtgaagcaggattctaccatatattgaacaacccaaaagcatcattattatctttgactcaatttcctcacttctccagtgtagtattaggcaatgctgctggcctaggcataatgggagagtacagaggtacaccgaggaatcaagatctatatgatgcagcaaaggcatatgctgaacaactcaaagaaaatggtgtgattaactacagtgtactagacttgacagcagaagaactagaggctatcaaacatcagcttaatccaaaagataatgatgtagagctttgagttaataaaaaatggggcaaataaatcatcatggaaaagtttgctcctgaattccatggagaagatgcaaacaacagggctactaaattcctagaatcaataaagggcaaattcacatcacccaaagatcccaagaaaaaagatagtatcatatctgtcaactcaatagatatagaagtaaccaaagaaagccctataacatcaaattcaactattatcaacccaacaaatgagacagatgatactgcagggaacaagcccaattatcaaagaaaacctctagtaagtttcaaagaagaccctacaccaagtgataatcccttttctaaactatacaaagaaaccatagaaacatttgataacaatgaagaagaatccagctattcatacgaagaaataaatgatcagacaaacgataatataacagcaagattagataggattgatgaaaaattaagtgaaatactaggaatgcttcacacattagtagtggcaagtgcaggacctacatctgctcgggatggtataagagatgccatgattggtttaagagaagaaatgatagaaaaaatcagaactgaagcattaatgaccaatgacagattagaagctatggcaagactcaggaatgaggaaagtgaaaagatggcaaaagacacatcagatgaagtgtctctcaatccaacatcagagaaattgaacaacctattggaagggaatgatagtgacaatgatctatcacttgaagatttctgattagttaccactcttcacatcaacacacaataccaacagaagaccaacaaactaaccaacccaatcatccaaccaaacatccatccgccaatcagccaaacagccaacaaaacaaccagccaatccaaaactaaccacccggaaaaaatctataatatagttacaaaaaaaggaaagggtggggcaaatatggaaacatacgtgaacaagcttcacgaaggctccacatacacagctgctgttcaatacaatgtcttagaaaaagacgatgaccctgcatcacttacaatatgggtgcccatgttccaatcatctatgccagcagatttacttataaaagaactagctaatgtcaacatactagtgaaacaaatatccacacccaagggaccttcactaagagtcatgataaactcaagaagtgcagtgctagcacaaatgcccagcaaatttaccatatgcgctaatgtgtccttggatgaaagaagcaaactagcatatgatgtaaccacaccctgtgaaatcaaggcatgtagtctaacatgcctaaaatcaaaaaatatgttgactacagttaaagatctcactatgaagacactcaaccctacacatgatattattgctttatgtgaatttgaaaacatagtaacatcaaaaaaagtcataataccaacatacctaagatccatcagtgtcagaaataaagatctgaacacacttgaaaatataacaaccactgaattcaaaaatgctatcacaaatgcaaaaatcatcccttactcaggattactattagtcatcacagtgactgacaacaaaggagcattcaaatacataaagccacaaagtcaattcatagtagatcttggagcttacctagaaaaagaaagtatatattatgttaccacaaattggaagcacacagctacacgatttgcaatcaaacccatggaagattaacctttttcctctacatcagtgtgttaattcatacaaactttctacctacattcttcacttcaccatcacaatcacaaacactctgtggttcaaccaatcaaacaaaacttatctgaagtcccagatcatcccaagtcattgtttatcagatctagtactcaaataagttaataaaaaatatacacatggacgtccatggggcaaatgcaaacatgtttgtttttcttgttttattgccactagtctctagtcagtgtgttaatcttacaaccagaactcaattaccccctgcatacactaattctttcacacgtggtgtttattaccctgacaaagttttcagatcctcagttttacattcaactcaggacttgttcttacctttcttttccaatgttacttggttccatgctatacatgtctctgggaccaatggtactaagaggtttgataaccctgtcctaccatttaatgatggtgtttattttgcttccactgagaagtctaacataataagaggctggatttttggtactactttagattcgaagacccagtccctacttattgttaataacgctactaatgttgttattaaagtctgtgaatttcaattttgtaatgatccatttttgggtgtttattaccacaaaaacaacaaaagttggatggaaagtgagttcagagtttattctagtgcgaataattgcacttttgaatatgtctctcagccttttcttatggaccttgaaggaaaacagggtaatttcaaaaatcttagggaatttgtgtttaagaatattgatggttattttaaaatatattctaagcacacgcctattaatttagtgcgtgatctccctcagggtttttcggctttagaaccattggtagatttgccaataggtattaacatcactaggtttcaaactttacttgctttacatagaagttatttgactcctggtgattcttcttcaggttggacagctggtgctgcagcttattatgtgggttatcttcaacctaggacttttctattaaaatataatgaaaatggaaccattacagatgctgtagactgtgcacttgaccctctctcagaaacaaagtgtacgttgaaatccttcactgtagaaaaaggaatctatcaaacttctaactttagagtccaaccaacagaatctattgttagatttcctaatattacaaacttgtgcccttttggtgaagtttttaacgccaccagatttgcatctgtttatgcttggaacaggaagagaatcagcaactgtgttgctgattattctgtcctatataattccgcatcattttccacttttaagtgttatggagtgtctcctactaaattaaatgatctctgctttactaatgtctatgcagattcatttgtaattagaggtgatgaagtcagacaaatcgctccagggcaaactggaaagattgctgattataattataaattaccagatgattttacaggctgcgttatagcttggaattctaacaatcttgattctaaggttggtggtaattataattacctgtatagattgtttaggaagtctaatctcaaaccttttgagagagatatttcaactgaaatctatcaggccggtagcacaccttgtaatggtgttgaaggttttaattgttactttcctttacaatcatatggtttccaacccactaatggtgttggttaccaaccatacagagtagtagtactttcttttgaacttctacatgcaccagcaactgtttgtggacctaaaaagtctactaatttggttaaaaacaaatgtgtcaatttcaacttcaatggtttaacaggcacaggtgttcttactgagtctaacaaaaagtttctgcctttccaacaatttggcagagacattgctgacactactgatgctgtccgtgatccacagacacttgagattcttgacattacaccatgttcttttggtggtgtcagtgttataacaccaggaacaaatacttctaaccaggttgctgttctttatcaggatgttaactgcacagaagtccctgttgctattcatgcagatcaacttactcctacttggcgtgtttattctacaggttctaatgtttttcaaacacgtgcaggctgtttaataggggctgaacatgtcaacaactcatatgagtgtgacatacccattggtgcaggtatatgcgctagttatcagactcagactaattctcctcggcgggcacgtagtgtagctagtcaatccatcattgcctacactatgtcacttggtgcagaaaattcagttgcttactctaataactctattgccatacccacaaattttactattagtgttaccacagaaattctaccagtgtctatgaccaagacatcagtagattgtacaatgtacatttgtggtgattcaactgaatgcagcaatcttttgttgcaatatggcagtttttgtacacaattaaaccgtgctttaactggaatagctgttgaacaagacaaaaacacccaagaagtttttgcacaagtcaaacaaatttacaaaacaccaccaattaaagattttggtggttttaatttttcacaaatattaccagatccatcaaaaccaagcaagaggtcatttattgaagatctacttttcaacaaagtgacacttgcagatgctggcttcatcaaacaatatggtgattgccttggtgatattgctgctagagacctcatttgtgcacaaaagtttaacggccttactgttttgccacctttgctcacagatgaaatgattgctcaatacacttctgcactgttagcgggtacaatcacttctggttggacctttggtgcaggtgctgcattacaaataccatttgctatgcaaatggcttataggtttaatggtattggagttacacagaatgttctctatgagaaccaaaaattgattgccaaccaatttaatagtgctattggcaaaattcaagactcactttcttccacagcaagtgcacttggaaaacttcaagatgtggtcaaccaaaatgcacaagctttaaacacgcttgttaaacaacttagctccaattttggtgcaatttcaagtgttttaaatgatatcctttcacgtcttgacaaagttgaggctgaagtgcaaattgataggttgatcacaggcagacttcaaagtttgcagacatatgtgactcaacaattaattagagctgcagaaatcagagcttctgctaatcttgctgctactaaaatgtcagagtgtgtacttggacaatcaaaaagagttgatttttgtggaaagggctatcatcttatgtccttccctcagtcagcacctcatggtgtagtcttcttgcatgtgacttatgtccctgcacaagaaaagaacttcacaactgctcctgccatttgtcatgatggaaaagcacactttcctcgtgaaggtgtctttgtttcaaatggcacacactggtttgtaacacaaaggaatttttatgaaccacaaatcattactacagacaacacatttgtgtctggtaactgtgatgttgtaataggaattgtcaacaacacagtttatgatcctttgcaacctgaattagactcattcaaggaggagttagataaatattttaagaatcatacatcaccagatgttgatttaggtgacatctctggcattaatgcttcagttgtaaacattcaaaaagaaattgaccgcctcaatgaggttgccaagaatttaaatgaatctctcatcgatctccaagaacttggaaagtatgagcagtatataaaatggccatggtacatttggctaggttttatagctggcttgattgccatagtaatggtgacaattatgctttgctgtatgaccagttgctgtagttgtctcaagggactgctcctatactgtaaggccagaagcacaccaatcacactaagcaaggatcaactgagtggtataaataatattgcatttagtaactaaataaaaatagcacctaatcatgttcttacaatggtttactatctgctcatagacaacccatctatcattggattttcttaaaatctgaacttcatcgaaactcttatctataaaccatctcacttacactatttaagtagattcctagtttatagttatataaaacacaattgaatgccagtcgaccttaccatctgtaaaaatgaaaactggggcaaatatgtcacgaaggaatccttgcaaatttgaaattcgaggtcattgcttaaatggtaagaggtgtcattttagtcataattattttgaatggccaccccatgcactgcttgtaagacaaaactttatgttaaacagaatacttaagtctatggataaaagtatagataccttatcagaaataagtggagctgcagagttggacagaacagaagagtatgctcttggtgtagttggagtgctagagagttatataggatcaataaacaatataactaaacaatcagcatgtgttgccatgagcaaactcctcactgaactcaatagtgatgatatcaaaaagctgagggacaatgaagagctaaattcacccaagataagagtgtacaatactgtcatatcatatattgaaagcaacaggaaaaacaataaacaaactatccatctgttaaaaagattgccagcagacgtattgaagaaaaccatcaaaaacacattggatatccataagagcataaccatcaacaacccaaaagaatcaactgttagtgatacaaatgaccatgccaaaaataatgatactacctgacaaatatccttgtagtataacttccatactaataacaagtagatgtagagttactatgtataatcaaaagaacacactatatttcaatcaaaacaacccaaataaccatatgtactcaccgaatcaaacattcaatgaaatccattggacctctcaagaattgattgacacaattcaaaattttctacaacatctaggtattattgaggatatatatacaatatatatattagtgtcataacactcaattctaacactcaccacatcgttacattattaattcaaacaattcaagttgtgggacaaaatggatcccattattaatggaaattctgctaatgtttatctaaccgatagttatttaaaaggtgttatctctttctcagagtgtaatgctttaggaagttacatattcaatggtccttatctcaaaaatgattataccaacttaattagtagacaaaatccattaatagaacacatgaatctaaagaaactaaatataacacagtccttaatatctaagtatcataaaggtgaaataaaattagaagaacctacttattttcagtcattacttatgacatacaagagtatgacctcgtcagaacagattgctaccactaatttacttaaaaagataataagaagagctatagaaataagtgatgtcaaagtctatgctatattgaataaactagggcttaaagaaaaggacaagattaaatccaacaatggacaagatgaagacaactcagttattacgaccataatcaaagatgatatactttcagctgttaaagataatcaatctcatcttaaagcagacaaaaatcactctacaaaacaaaaagacacaatcaaaacaacactcttgaagaaattgatgtgttcaatgcaacatcctccatcatggttaatacattggtttaacttatacacaaaattaaacaacatattaacacagtatcgatcaaatgaggtaaaaaaccatgggtttacattgatagataatcaaactcttagtggatttcaatttattttgaaccaatatggttgtatagtttatcataaggaactcaaaagaattactgtgacaacctataatcaattcttgacatggaaagatattagccttagtagattaaatgtttgtttaattacatggattagtaactgcttgaacacattaaataaaagcttaggcttaagatgcggattcaataatgttatcttgacacaactattcctttatggagattgtatactaaagctatttcacaatgaggggttctacataataaaagaggtagagggatttattatgtctctaattttaaatataacagaagaagatcaattcagaaaacgattttataatagtatgctcaacaacatcacagatgctgctaataaagctcagaaaaatctgctatcaagagtatgtcatacattattagataagacagtgtccgataatataataaatggcagatggataattctattaagtaagttccttaaattaattaagcttgcaggtgacaataaccttaacaatctgagtgaactatattttttgttcagaatatttggacacccaatggtagatgaaagacaagccatggatgctgttaaaattaattgcaatgagaccaaattttacttgttaagcagtctgagtatgttaagaggtgcctttatatatagaattataaaagggtttgtaaataattacaacagatggcctactttaagaaatgctattgttttacccttaagatggttaacttactataaactaaacacttatccttctttgttggaacttacagaaagagatttgattgtgttatcaggactacgtttctatcgtgagtttcggttgcctaaaaaagtggatcttgaaatgattataaatgataaagctatatcacctcctaaaaatttgatatggactagtttccctagaaattacatgccatcacacatacaaaactatatagaacatgaaaaattaaaattttccgagagtgataaatcaagaagagtattagagtattatttaagagataacaaattcaatgaatgtgatttatacaactgtgtagttaatcaaagttatctcaacaaccctaatcatgtggtatcattgacaggcaaagaaagagaactcagtgtaggtagaatgtttgcaatgcaaccgggaatgttcagacaggttcaaatattggcagagaaaatgatagctgaaaacattttacaattctttcctgaaagtcttacaagatatggtgatctagaactacaaaaaatattagaattgaaagcaggaataagtaacaaatcaaatcgctacaatgataattacaacaattacattagtaagtgctctatcatcacagatctcagcaaattcaatcaagcatttcgatatgaaacgtcatgtatttgtagtgatgtgctggatgaactgcatggtgtacaatctctattttcctggttacatttaactattcctcatgtcacaataatatgcacatataggcatgcacccccctatataggagatcatattgtagatcttaacaatgtagatgaacaaagtggattatatagatatcacatgggtggcatcgaagggtggtgtcaaaaactgtggaccatagaagctatatcactattggatctaatatctctcaaagggaaattctcaattactgctttaattaatggtgacaatcaatcaatagatataagcaaaccaatcagactcatggaaggtcaaactcatgctcaagcagattatttgctagcattaaatagccttaaattactgtataaagagtatgcaggcataggccacaaattaaaaggaactgagacttatatatcacgagatatgcaatttatgagtaaaacaattcaacataacggtgtatattacccagctagtataaagaaagtcctaagagtgggaccgtggataaacactatacttgatgatttcaaagtgagtctagaatctataggtagtttgacacaagaattagaatatagaggtgaaagtctattatgcagtttaatatttagaaatgtatggttatataatcagattgctctacaattaaaaaatcatgcattatgtaacaataaactatatttggacatattaaaggttctgaaacacttaaaaaccttttttaatcttgataatattgatacagcattaacattgtatatgaatttacccatgttatttggtggtggtgatcccaacttgttatatcgaagtttctatagaagaactcctgacttcctcacagaggctatagttcactctgtgttcatacttagttattatacaaaccatgacttaaaagataaacttcaagatctgtcagatgatagattgaataagttcttaacatgcataatcacgtttgacaaaaaccctaatgctgaattcgtaacattgatgagagatcctcaagctttagggtctgagagacaagctaaaattactagcgaaatcaatagactggcagttacagaggttttgagtacagctccaaacaaaatattctccaaaagtgcacaacattatactactacagagatagatctaaatgatattatgcaaaatatagaacctacatatcctcatgggctaagagttgtttatgaaagtttacccttttataaagcagagaaaatagtaaatcttatatcaggtacaaaatctataactaacatactggaaaaaacttctgccatagacttaacagatattgatagagccactgagatgatgaggaaaaacataactttgcttataaggatacttccattggattgtaacagagataaaagagagatattgagtatggaaaacctaagtattactgaattaagcaaatatgttagggaaagatcttggtctttatccaatatagttggtgttacatcacccagtatcatgtatacaatggacatcaaatatactacaagcactatatctagtggcataattatagagaaatataatgttaacagtttaacacgtggtgagagaggacccactaaaccatgggttggttcatctacacaagagaaaaaaacaatgccagtttataatagacaagtcttaaccaaaaaacagagagatcaaatagatctattagcaaaattggattgggtgtatgcatctatagataacaaggatgaattcatggaagaactcagcataggaacccttgggttaacatatgaaaaggccaagaaattatttccacaatatttaagtgtcaattatttgcatcgccttacagtcagtagtagaccatgtgaattccctgcatcaataccagcttatagaacaacaaattatcactttgacactagccctattaatcgcatattaacagaaaagtatggtgatgaagatattgacatagtattccaaaactgtataagctttggccttagtttaatgtcagtagtagaacaatttactaatgtatgtcctaacagaattattctcatacctaagcttaatgagatacatttgatgaaacctcccatattcacaggtgatgttgatattcacaagttaaaacaagtgatacaaaaacagcatatgtttttaccagacaaaataagtttgactcaatatgtggaattattcttaagtaataaaacactcaaatctggatctcatgttaattctaatttaatattggcacataaaatatctgactattttcataatacttacattttaagtactaatttagctggacattggattctgattatacaacttatgaaagattctaaaggtatttttgaaaaagattggggagagggatatataactgatcatatgtttattaatttgaaagttttcttcaatgcttataagacctatctcttgtgttttcataaaggttatggcaaagcaaagctggagtgtgatatgaacacttcagatcttctatgtgtattggaattaatagacagtagttattggaagtctatgtctaaggtatttttagaacaaaaagttatcaaatacattcttagccaagatgcaagtttacatagagtaaaaggatgtcatagcttcaaattatggtttcttaaacgtcttaatgtagcagaattcacagtttgcccttgggttgttaacatagattatcatccaacacatatgaaagcaatattaacttatatagatcttgttagaatgggattgataaatatagatagaatacacattaaaaataaacacaaattcaatgatgaattttatacttctaatctcttctacattaattataacttctcagataatactcatctattaactaaacatataaggattgctaattctgaattagaaaataattacaacaaattatatcatcctacaccagaaaccctagagaatatactagccaatccgattaaaagtaatgacaaaaagacactgaatgactattgtataggtaaaaatgttgactcaataatgttaccattgttatctaataagaagcttattaaatcgtctgcaatgattagaaccaattacagcaaacaagatttgtataatttattccctatggttgtgattgatagaattatagatcattcaggcaatacagccaaatccaaccaactttacactactacttcccaccaaatatctttagtgcacaatagcacatcactttactgcatgcttccttggcatcatattaatagattcaattttgtatttagttctacaggttgtaaaattagtatagagtatattttaaaagatcttaaaattaaagatcccaattgtatagcattcataggtgaaggagcagggaatttattattgcgtacagtagtggaacttcatcctgacataagatatatttacagaagtctgaaagattgcaatgatcatagtttacctattgagtttttaaggctgtacaatggacatatcaacattgattatggtgaaaatttgaccattcctgctacagatgcaaccaacaacattcattggtcttatttacatataaagtttgctgaacctatcagtctttttgtctgtgatgccgaattgtctgtaacagtcaactggagtaaaattataatagaatggagcaagcatgtaagaaagtgcaagtactgttcctcagttaataaatgtatgttaatagtaaaatatcatgctcaagatgatattgatttcaaattagacaatataactatattaaaaacttatgtatgcttaggcagtaagttaaagggatcggaggtttacttagtccttacaataggtcctgcgaatatattcccagtatttaatgtagtacaaaatgctaaattgatactatcaagaaccaaaaatttcatcatgcctaagaaagctgataaagagtctattgatgcaaatattaaaagtttgataccctttctttgttaccctataacaaaaaaaggaattaatactgcattgtcaaaactaaagagtgttgttagtggagatatactatcatattctatagctggacgtaatgaagttttcagcaataaacttataaatcataagcatatgaacatcttaaaatggttcaatcatgttttaaatttcagatcaacagaactaaactataaccatttatatatggtagaatctacatatccttacctaagtgaattgttaaacagcttgacaaccaatgaacttaaaaaactgattaaaatcacaggtagtctgttatacaactttcataatgaataatgaataaagatcttataataaaaattcccatagctatacactaacactgtattcaattatagttattaaaaattaaaaatcgtacgattttttaaataacttttagtgaactaatcctaaagttatcattttaatcttggaggaataaatttaaaccctaatctaattggtttatatgtgtattaactaaattacgagatattagtttttgacactttttttctcgt

SEQ ID NO: 108 - DNA, 16683 bp, Artificial Sequence
  Description of Artificial Sequence: Synthetic polynucleotide
acgcgaaaaaatgcgtacaacaaacttgcataaaccaaaaaaatggggcaaataagaatttgataagtaccacttaaatttaactcccttgcttagcgatggtgagcgagctgattaaggagaacatgcacatgaagctgtacatggagggcaccgtgaacaaccaccacttcaagtgcacatccgagggcgaaggcaagccctacgagggcacccagaccatgagaatcaaggcggtcgagggcggccctctccccttcgccttcgacatcctggctaccagcttcatgtacggcagcaaaaccttcatcaaccacacccagggcatccccgacttctttaagcagtccttccccgagggcttcacatgggagagagtcaccacatacgaagacgggggcgtgctgaccgctacccaggacaccagcctccaggacggctgcctcatctacaacgtcaagatcagaggggtgaacttcccatccaacggccctgtgatgcagaagaaaacactcggctgggaggcctccaccgagaccctgtaccccgctgacggcggcctggaaggcagagccgacatggccctgaagctcgtgggcgggggccacctgatctgcaacttgaagaccacatacagatccaagaaacccgctaagaacctcaagatgcccggcgtctactatgtggacagaagactggaaagaatcaaggaggccgacaaagagacctacgtcgagcagcacgaggtggctgtggccagatactgcgacctccctagcaaactggggcacagatgagtattcaattatagttattaaaaacttaacagaagacaaaaatggggcaaataagaatttgataagtaccacttaaatttaactcccttgcttagcgatgggttcgaattcgctatcgatgataaaagtacgtctacaaaatctatttgataatgatgaagtagcgctactaaaaataacgtgttatacggataaactaatacatctaacgaatgcgctagcgaaagcggtaatacatacgataaaactaaatggtatagtatttgtacatgtaataacgtcgtcggatatatgtccgaataataatatagtagtaaaatcgaattttacgacgatgccggtactacaaaatggtggttatatatgggaaatgatggaactaacgcattgttcgcaaccgaatggtctactagatgataattgtgaaataaaattttcgaaaaaactatcggattcgacgatgacgaattatatgaatcaactatcggaactactaggttttgatctaaatccgtaaattataattaatatcaactagcaaatcaatgtcactaacaccattagttaatataaaacttaacagaagacaaaaatggggcaaataaatcaattcagccaacccaaccatggatacgacgcataatgataatacgccgcaacgtctaatgataacggatatgcgtccgctatcgctagaaacgataataacgtcgctaacgcgtgatataataacgcataaatttatatatctaataaatcatgaatgtatagtacgtaaactagatgaacgtcaagcgacgtttacgtttctagtaaattatgaaatgaaactactacataaagtaggttcgacgaaatataaaaaatatacggaatataatacgaaatatggtacgtttccgatgccgatatttataaatcatgatggttttctagaatgtataggtataaaaccgacgaaacatacgccgataatatataaatatgatctaaatccgtaaatttcaacacaatattcacacaatctaaaacaacaactctatgcataactatactccatagtccagatggagcctgaaaattatagtaatttaaaattaaggagagatataagatagaagatggggcaaatacaaagatggctcttagcaaagtcaagttgaatgatacactcaacaaagatcaacttctgtcatccagcaaatacaccatccaacggagcacaggagatagtattgatactcctaattatgatgtgcagaaacacatcaataagttatgtggcatgttattaatcacagaagatgctaatcataaattcactgggttaataggtatgttatatgcgatgtctaggttaggaagagaagacaccataaaaatactcagagatgcgggatatcatgtaaaagcaaatggagtagatgtaacaacacatcgtcaagacattaatggaaaagaaatgaaatttgaagtgttaacattggcaagcttaacaactgaaattcaaatcaacattgagatagaatctagaaaatcctacaaaaaaatgctaaaagaaatgggagaggtagctccagaatacaggcatgactctcctgattgtgggatgataatattatgtatagcagcattagtaataactaaattagcagcaggggacagatctggtcttacagccgtgattaggagagctaataatgtcctaaaaaatgaaatgaaacgttacaaaggcttactacccaaggacatagccaacagcttctatgaagtgtttgaaaaacatccccactttatagatgtttttgttcattttggtatagcacaatcttctaccagaggtggcagtagagttgaagggatttttgcaggattgtttatgaatgcctatggtgcagggcaagtgatgttacggtggggagtcttagcaaaatcagttaaaaatattatgttaggacatgctagtgtgcaagcagaaatggaacaagttgttgaggtttatgaatatgcccaaaaattgggtggtgaagcaggattctaccatatattgaacaacccaaaagcatcattattatctttgactcaatttcctcacttctccagtgtagtattaggcaatgctgctggcctaggcataatgggagagtacagaggtacaccgaggaatcaagatctatatgatgcagcaaaggcatatgctgaacaactcaaagaaaatggtgtgattaactacagtgtactagacttgacagcagaagaactagaggctatcaaacatcagcttaatccaaaagataatgatgtagagctttgagttaataaaaaatggggcaaataaatcatcatggaaaagtttgctcctgaattccatggagaagatgcaaacaacagggctactaaattcctagaatcaataaagggcaaattcacatcacccaaagatcccaagaaaaaagatagtatcatatctgtcaactcaatagatatagaagtaaccaaagaaagccctataacatcaaattcaactattatcaacccaacaaatgagacagatgatactgcagggaacaagcccaattatcaaagaaaacctctagtaagtttcaaagaagaccctacaccaagtgataatcccttttctaaactatacaaagaaaccatagaaacatttgataacaatgaagaagaatccagctattcatacgaagaaataaatgatcagacaaacgataatataacagcaagattagataggattgatgaaaaattaagtgaaatactaggaatgcttcacacattagtagtggcaagtgcaggacctacatctgctcgggatggtataagagatgccatgattggtttaagagaagaaatgatagaaaaaatcagaactgaagcattaatgaccaatgacagattagaagctatggcaagactcaggaatgaggaaagtgaaaagatggcaaaagacacatcagatgaagtgtctctcaatccaacatcagagaaattgaacaacctattggaagggaatgatagtgacaatgatctatcacttgaagatttctgattagttaccactcttcacatcaacacacaataccaacagaagaccaacaaactaaccaacccaatcatccaaccaaacatccatccgccaatcagccaaacagccaacaaaacaaccagccaatccaaaactaaccacccggaaaaaatctataatatagttacaaaaaaaggaaagggtggggcaaatatggaaacatacgtgaacaagcttcacgaaggctccacatacacagctgctgttcaatacaatgtcttagaaaaagacgatgaccctgcatcacttacaatatgggtgcccatgttccaatcatctatgccagcagatttacttataaaagaactagctaatgtcaacatactagtgaaacaaatatccacacccaagggaccttcactaagagtcatgataaactcaagaagtgcagtgctagcacaaatgcccagcaaatttaccatatgcgctaatgtgtccttggatgaaagaagcaaactagcatatgatgtaaccacaccctgtgaaatcaaggcatgtagtctaacatgcctaaaatcaaaaaatatgttgactacagttaaagatctcactatgaagacactcaaccctacacatgatattattgctttatgtgaatttgaaaacatagtaacatcaaaaaaagtcataataccaacatacctaagatccatcagtgtcagaaataaagatctgaacacacttgaaaatataacaaccactgaattcaaaaatgctatcacaaatgcaaaaatcatcccttactcaggattactattagtcatcacagtgactgacaacaaaggagcattcaaatacataaagccacaaagtcaattcatagtagatcttggagcttacctagaaaaagaaagtatatattatgttaccacaaattggaagcacacagctacacgatttgcaatcaaacccatggaagattaacctttttcctctacatcagtgtgttaattcatacaaactttctacctacattcttcacttcaccatcacaatcacaaacactctgtggttcaaccaatcaaacaaaacttatctgaagtcccagatcatcccaagtcattgtttatcagatctagtactcaaataagttaataaaaaatatacacatggacgtccatggggcaaatgcaaacatgtttgtttttcttgttttattgccactagtctctagtcagtgtgttaatcttacaaccagaactcaattaccccctgcatacactaattctttcacacgtggtgtttattaccctgacaaagttttcagatcctcagttttacattcaactcaggacttgttcttacctttcttttccaatgttacttggttccatgctatacatgtctctgggaccaatggtactaagaggtttgataaccctgtcctaccatttaatgatggtgtttattttgcttccactgagaagtctaacataataagaggctggatttttggtactactttagattcgaagacccagtccctacttattgttaataacgctactaatgttgttattaaagtctgtgaatttcaattttgtaatgatccatttttgggtgtttattaccacaaaaacaacaaaagttggatggaaagtgagttcagagtttattctagtgcgaataattgcacttttgaatatgtctctcagccttttcttatggaccttgaaggaaaacagggtaatttcaaaaatcttagggaatttgtgtttaagaatattgatggttattttaaaatatattctaagcacacgcctattaatttagtgcgtgatctccctcagggtttttcggctttagaaccattggtagatttgccaataggtattaacatcactaggtttcaaactttacttgctttacatagaagttatttgactcctggtgattcttcttcaggttggacagctggtgctgcagcttattatgtgggttatcttcaacctaggacttttctattaaaatataatgaaaatggaaccattacagatgctgtagactgtgcacttgaccctctctcagaaacaaagtgtacgttgaaatccttcactgtagaaaaaggaatctatcaaacttctaactttagagtccaaccaacagaatctattgttagatttcctaatattacaaacttgtgcccttttggtgaagtttttaacgccaccagatttgcatctgtttatgcttggaacaggaagagaatcagcaactgtgttgctgattattctgtcctatataattccgcatcattttccacttttaagtgttatggagtgtctcctactaaattaaatgatctctgctttactaatgtctatgcagattcatttgtaattagaggtgatgaagtcagacaaatcgctccagggcaaactggaaagattgctgattataattataaattaccagatgattttacaggctgcgttatagcttggaattctaacaatcttgattctaaggttggtggtaattataattacctgtatagattgtttaggaagtctaatctcaaaccttttgagagagatatttcaactgaaatctatcaggccggtagcacaccttgtaatggtgttgaaggttttaattgttactttcctttacaatcatatggtttccaacccactaatggtgttggttaccaaccatacagagtagtagtactttcttttgaacttctacatgcaccagcaactgtttgtggacctaaaaagtctactaatttggttaaaaacaaatgtgtcaatttcaacttcaatggtttaacaggcacaggtgttcttactgagtctaacaaaaagtttctgcctttccaacaatttggcagagacattgctgacactactgatgctgtccgtgatccacagacacttgagattcttgacattacaccatgttcttttggtggtgtcagtgttataacaccaggaacaaatacttctaaccaggttgctgttctttatcaggatgttaactgcacagaagtccctgttgctattcatgcagatcaacttactcctacttggcgtgtttattctacaggttctaatgtttttcaaacacgtgcaggctgtttaataggggctgaacatgtcaacaactcatatgagtgtgacatacccattggtgcaggtatatgcgctagttatcagactcagactaattctcctcggcgggcacgtagtgtagctagtcaatccatcattgcctacactatgtcacttggtgcagaaaattcagttgcttactctaataactctattgccatacccacaaattttactattagtgttaccacagaaattctaccagtgtctatgaccaagacatcagtagattgtacaatgtacatttgtggtgattcaactgaatgcagcaatcttttgttgcaatatggcagtttttgtacacaattaaaccgtgctttaactggaatagctgttgaacaagacaaaaacacccaagaagtttttgcacaagtcaaacaaatttacaaaacaccaccaattaaagattttggtggttttaatttttcacaaatattaccagatccatcaaaaccaagcaagaggtcatttattgaagatctacttttcaacaaagtgacacttgcagatgctggcttcatcaaacaatatggtgattgccttggtgatattgctgctagagacctcatttgtgcacaaaagtttaacggccttactgttttgccacctttgctcacagatgaaatgattgctcaatacacttctgcactgttagcgggtacaatcacttctggttggacctttggtgcaggtgctgcattacaaataccatttgctatgcaaatggcttataggtttaatggtattggagttacacagaatgttctctatgagaaccaaaaattgattgccaaccaatttaatagtgctattggcaaaattcaagactcactttcttccacagcaagtgcacttggaaaacttcaagatgtggtcaaccaaaatgcacaagctttaaacacgcttgttaaacaacttagctccaattttggtgcaatttcaagtgttttaaatgatatcctttcacgtcttgacaaagttgaggctgaagtgcaaattgataggttgatcacaggcagacttcaaagtttgcagacatatgtgactcaacaattaattagagctgcagaaatcagagcttctgctaatcttgctgctactaaaatgtcagagtgtgtacttggacaatcaaaaagagttgatttttgtggaaagggctatcatcttatgtccttccctcagtcagcacctcatggtgtagtcttcttgcatgtgacttatgtccctgcacaagaaaagaacttcacaactgctcctgccatttgtcatgatggaaaagcacactttcctcgtgaaggtgtctttgtttcaaatggcacacactggtttgtaacacaaaggaatttttatgaaccacaaatcattactacagacaacacatttgtgtctggtaactgtgatgttgtaataggaattgtcaacaacacagtttatgatcctttgcaacctgaattagactcattcaaggaggagttagataaatattttaagaatcatacatcaccagatgttgatttaggtgacatctctggcattaatgcttcagttgtaaacattcaaaaagaaattgaccgcctcaatgaggttgccaagaatttaaatgaatctctcatcgatctccaagaacttggaaagtatgagcagtatataaaatggccatggtacatttggctaggttttatagctggcttgattgccatagtaatggtgacaattatgctttgctgtatgaccagttgctgtagttgtctcaaggccagaagcacaccaatcacactaagcaaggatcaactgagtggtataaataatattgcatttagtaactaaataaaaatagcacctaatcatgttcttacaatggtttactatctgctcatagacaacccatctatcattggattttcttaaaatctgaacttcatcgaaactcttatctataaaccatctcacttacactatttaagtagattcctagtttatagttatataaaacacaattgaatgccagtcgaccttaccatctgtaaaaatgaaaactggggcaaatatgtcacgaaggaatccttgcaaatttgaaattcgaggtcattgcttaaatggtaagaggtgtcattttagtcataattattttgaatggccaccccatgcactgcttgtaagacaaaactttatgttaaacagaatacttaagtctatggataaaagtatagataccttatcagaaataagtggagctgcagagttggacagaacagaagagtatgctcttggtgtagttggagtgctagagagttatataggatcaataaacaatataactaaacaatcagcatgtgttgccatgagcaaactcctcactgaactcaatagtgatgatatcaaaaagctgagggacaatgaagagctaaattcacccaagataagagtgtacaatactgtcatatcatatattgaaagcaacaggaaaaacaataaacaaactatccatctgttaaaaagattgccagcagacgtattgaagaaaaccatcaaaaacacattggatatccataagagcataaccatcaacaacccaaaagaatcaactgttagtgatacaaatgaccatgccaaaaataatgatactacctgacaaatatccttgtagtataacttccatactaataacaagtagatgtagagttactatgtataatcaaaagaacacactatatttcaatcaaaacaacccaaataaccatatgtactcaccgaatcaaacattcaatgaaatccattggacctctcaagaattgattgacacaattcaaaattttctacaacatctaggtattattgaggatatatatacaatatatatattagtgtcataacactcaattctaacactcaccacatcgttacattattaattcaaacaattcaagttgtgggacaaaatggatcccattattaatggaaattctgctaatgtttatctaaccgatagttatttaaaaggtgttatctctttctcagagtgtaatgctttaggaagttacatattcaatggtccttatctcaaaaatgattataccaacttaattagtagacaaaatccattaatagaacacatgaatctaaagaaactaaatataacacagtccttaatatctaagtatcataaaggtgaaataaaattagaagaacctacttattttcagtcattacttatgacatacaagagtatgacctcgtcagaacagattgctaccactaatttacttaaaaagataataagaagagctatagaaataagtgatgtcaaagtctatgctatattgaataaactagggcttaaagaaaaggacaagattaaatccaacaatggacaagatgaagacaactcagttattacgaccataatcaaagatgatatactttcagctgttaaagataatcaatctcatcttaaagcagacaaaaatcactctacaaaacaaaaagacacaatcaaaacaacactcttgaagaaattgatgtgttcaatgcaacatcctccatcatggttaatacattggtttaacttatacacaaaattaaacaacatattaacacagtatcgatcaaatgaggtaaaaaaccatgggtttacattgatagataatcaaactcttagtggatttcaatttattttgaaccaatatggttgtatagtttatcataaggaactcaaaagaattactgtgacaacctataatcaattcttgacatggaaagatattagccttagtagattaaatgtttgtttaattacatggattagtaactgcttgaacacattaaataaaagcttaggcttaagatgcggattcaataatgttatcttgacacaactattcctttatggagattgtatactaaagctatttcacaatgaggggttctacataataaaagaggtagagggatttattatgtctctaattttaaatataacagaagaagatcaattcagaaaacgattttataatagtatgctcaacaacatcacagatgctgctaataaagctcagaaaaatctgctatcaagagtatgtcatacattattagataagacagtgtccgataatataataaatggcagatggataattctattaagtaagttccttaaattaattaagcttgcaggtgacaataaccttaacaatctgagtgaactatattttttgttcagaatatttggacacccaatggtagatgaaagacaagccatggatgctgttaaaattaattgcaatgagaccaaattttacttgttaagcagtctgagtatgttaagaggtgcctttatatatagaattataaaagggtttgtaaataattacaacagatggcctactttaagaaatgctattgttttacccttaagatggttaacttactataaactaaacacttatccttctttgttggaacttacagaaagagatttgattgtgttatcaggactacgtttctatcgtgagtttcggttgcctaaaaaagtggatcttgaaatgattataaatgataaagctatatcacctcctaaaaatttgatatggactagtttccctagaaattacatgccatcacacatacaaaactatatagaacatgaaaaattaaaattttccgagagtgataaatcaagaagagtattagagtattatttaagagataacaaattcaatgaatgtgatttatacaactgtgtagttaatcaaagttatctcaacaaccctaatcatgtggtatcattgacaggcaaagaaagagaactcagtgtaggtagaatgtttgcaatgcaaccgggaatgttcagacaggttcaaatattggcagagaaaatgatagctgaaaacattttacaattctttcctgaaagtcttacaagatatggtgatctagaactacaaaaaatattagaattgaaagcaggaataagtaacaaatcaaatcgctacaatgataattacaacaattacattagtaagtgctctatcatcacagatctcagcaaattcaatcaagcatttcgatatgaaacgtcatgtatttgtagtgatgtgctggatgaactgcatggtgtacaatctctattttcctggttacatttaactattcctcatgtcacaataatatgcacatataggcatgcacccccctatataggagatcatattgtagatcttaacaatgtagatgaacaaagtggattatatagatatcacatgggtggcatcgaagggtggtgtcaaaaactgtggaccatagaagctatatcactattggatctaatatctctcaaagggaaattctcaattactgctttaattaatggtgacaatcaatcaatagatataagcaaaccaatcagactcatggaaggtcaaactcatgctcaagcagattatttgctagcattaaatagccttaaattactgtataaagagtatgcaggcataggccacaaattaaaaggaactgagacttatatatcacgagatatgcaatttatgagtaaaacaattcaacataacggtgtatattacccagctagtataaagaaagtcctaagagtgggaccgtggataaacactatacttgatgatttcaaagtgagtctagaatctataggtagtttgacacaagaattagaatatagaggtgaaagtctattatgcagtttaatatttagaaatgtatggttatataatcagattgctctacaattaaaaaatcatgcattatgtaacaataaactatatttggacatattaaaggttctgaaacacttaaaaaccttttttaatcttgataatattgatacagcattaacattgtatatgaatttacccatgttatttggtggtggtgatcccaacttgttatatcgaagtttctatagaagaactcctgacttcctcacagaggctatagttcactctgtgttcatacttagttattatacaaaccatgacttaaaagataaacttcaagatctgtcagatgatagattgaataagttcttaacatgcataatcacgtttgacaaaaaccctaatgctgaattcgtaacattgatgagagatcctcaagctttagggtctgagagacaagctaaaattactagcgaaatcaatagactggcagttacagaggttttgagtacagctccaaacaaaatattctccaaaagtgcacaacattatactactacagagatagatctaaatgatattatgcaaaatatagaacctacatatcctcatgggctaagagttgtttatgaaagtttacccttttataaagcagagaaaatagtaaatcttatatcaggtacaaaatctataactaacatactggaaaaaacttctgccatagacttaacagatattgatagagccactgagatgatgaggaaaaacataactttgcttataaggatacttccattggattgtaacagagataaaagagagatattgagtatggaaaacctaagtattactgaattaagcaaatatgttagggaaagatcttggtctttatccaatatagttggtgttacatcacccagtatcatgtatacaatggacatcaaatatactacaagcactatatctagtggcataattatagagaaatataatgttaacagtttaacacgtggtgagagaggacccactaaaccatgggttggttcatctacacaagagaaaaaaacaatgccagtttataatagacaagtcttaaccaaaaaacagagagatcaaatagatctattagcaaaattggattgggtgtatgcatctatagataacaaggatgaattcatggaagaactcagcataggaacccttgggttaacatatgaaaaggccaagaaattatttccacaatatttaagtgtcaattatttgcatcgccttacagtcagtagtagaccatgtgaattccctgcatcaataccagcttatagaacaacaaattatcactttgacactagccctattaatcgcatattaacagaaaagtatggtgatgaagatattgacatagtattccaaaactgtataagctttggccttagtttaatgtcagtagtagaacaatttactaatgtatgtcctaacagaattattctcatacctaagcttaatgagatacatttgatgaaacctcccatattcacaggtgatgttgatattcacaagttaaaacaagtgatacaaaaacagcatatgtttttaccagacaaaataagtttgactcaatatgtggaattattcttaagtaataaaacactcaaatctggatctcatgttaattctaatttaatattggcacataaaatatctgactattttcataatacttacattttaagtactaatttagctggacattggattctgattatacaacttatgaaagattctaaaggtatttttgaaaaagattggggagagggatatataactgatcatatgtttattaatttgaaagttttcttcaatgcttataagacctatctcttgtgttttcataaaggttatggcaaagcaaagctggagtgtgatatgaacacttcagatcttctatgtgtattggaattaatagacagtagttattggaagtctatgtctaaggtatttttagaacaaaaagttatcaaatacattcttagccaagatgcaagtttacatagagtaaaaggatgtcatagcttcaaattatggtttcttaaacgtcttaatgtagcagaattcacagtttgcccttgggttgttaacatagattatcatccaacacatatgaaagcaatattaacttatatagatcttgttagaatgggattgataaatatagatagaatacacattaaaaataaacacaaattcaatgatgaattttatacttctaatctcttctacattaattataacttctcagataatactcatctattaactaaacatataaggattgctaattctgaattagaaaataattacaacaaattatatcatcctacaccagaaaccctagagaatatactagccaatccgattaaaagtaatgacaaaaagacactgaatgactattgtataggtaaaaatgttgactcaataatgttaccattgttatctaataagaagcttattaaatcgtctgcaatgattagaaccaattacagcaaacaagatttgtataatttattccctatggttgtgattgatagaattatagatcattcaggcaatacagccaaatccaaccaactttacactactacttcccaccaaatatctttagtgcacaatagcacatcactttactgcatgcttccttggcatcatattaatagattcaattttgtatttagttctacaggttgtaaaattagtatagagtatattttaaaagatcttaaaattaaagatcccaattgtatagcattcataggtgaaggagcagggaatttattattgcgtacagtagtggaacttcatcctgacataagatatatttacagaagtctgaaagattgcaatgatcatagtttacctattgagtttttaaggctgtacaatggacatatcaacattgattatggtgaaaatttgaccattcctgctacagatgcaaccaacaacattcattggtcttatttacatataaagtttgctgaacctatcagtctttttgtctgtgatgccgaattgtctgtaacagtcaactggagtaaaattataatagaatggagcaagcatgtaagaaagtgcaagtactgttcctcagttaataaatgtatgttaatagtaaaatatcatgctcaagatgatattgatttcaaattagacaatataactatattaaaaacttatgtatgcttaggcagtaagttaaagggatcggaggtttacttagtccttacaataggtcctgcgaatatattcccagtatttaatgtagtacaaaatgctaaattgatactatcaagaaccaaaaatttcatcatgcctaagaaagctgataaagagtctattgatgcaaatattaaaagtttgataccctttctttgttaccctataacaaaaaaaggaattaatactgcattgtcaaaactaaagagtgttgttagtggagatatactatcatattctatagctggacgtaatgaagttttcagcaataaacttataaatcataagcatatgaacatcttaaaatggttcaatcatgttttaaatttcagatcaacagaactaaactataaccatttatatatggtagaatctacatatccttacctaagtgaattgttaaacagcttgacaaccaatgaacttaaaaaactgattaaaatcacaggtagtctgttatacaactttcataatgaataatgaataaagatcttataataaaaattcccatagctatacactaacactgtattcaattatagttattaaaaattaaaaatcgtacgattttttaaataacttttagtgaactaatcctaaagttatcattttaatcttggaggaataaatttaaaccctaatctaattggtttatatgtgtattaactaaattacgagatattagtttttgacactttttttctcgt

SEQ ID NO: 109 - DNA, 16692 bp, Artificial Sequence
  Description of Artificial Sequence: Synthetic polynucleotide
acgcgaaaaaatgcgtacaacaaacttgcataaaccaaaaaaatggggcaaataagaatttgataagtaccacttaaatttaactcccttgcttagcgatggtgagcgagctgattaaggagaacatgcacatgaagctgtacatggagggcaccgtgaacaaccaccacttcaagtgcacatccgagggcgaaggcaagccctacgagggcacccagaccatgagaatcaaggcggtcgagggcggccctctccccttcgccttcgacatcctggctaccagcttcatgtacggcagcaaaaccttcatcaaccacacccagggcatccccgacttctttaagcagtccttccccgagggcttcacatgggagagagtcaccacatacgaagacgggggcgtgctgaccgctacccaggacaccagcctccaggacggctgcctcatctacaacgtcaagatcagaggggtgaacttcccatccaacggccctgtgatgcagaagaaaacactcggctgggaggcctccaccgagaccctgtaccccgctgacggcggcctggaaggcagagccgacatggccctgaagctcgtgggcgggggccacctgatctgcaacttgaagaccacatacagatccaagaaacccgctaagaacctcaagatgcccggcgtctactatgtggacagaagactggaaagaatcaaggaggccgacaaagagacctacgtcgagcagcacgaggtggctgtggccagatactgcgacctccctagcaaactggggcacagatgagtattcaattatagttattaaaaacttaacagaagacaaaaatggggcaaataagaatttgataagtaccacttaaatttaactcccttgcttagcgatgggttcgaattcgctatcgatgataaaagtacgtctacaaaatctatttgataatgatgaagtagcgctactaaaaataacgtgttatacggataaactaatacatctaacgaatgcgctagcgaaagcggtaatacatacgataaaactaaatggtatagtatttgtacatgtaataacgtcgtcggatatatgtccgaataataatatagtagtaaaatcgaattttacgacgatgccggtactacaaaatggtggttatatatgggaaatgatggaactaacgcattgttcgcaaccgaatggtctactagatgataattgtgaaataaaattttcgaaaaaactatcggattcgacgatgacgaattatatgaatcaactatcggaactactaggttttgatctaaatccgtaaattataattaatatcaactagcaaatcaatgtcactaacaccattagttaatataaaacttaacagaagacaaaaatggggcaaataaatcaattcagccaacccaaccatggatacgacgcataatgataatacgccgcaacgtctaatgataacggatatgcgtccgctatcgctagaaacgataataacgtcgctaacgcgtgatataataacgcataaatttatatatctaataaatcatgaatgtatagtacgtaaactagatgaacgtcaagcgacgtttacgtttctagtaaattatgaaatgaaactactacataaagtaggttcgacgaaatataaaaaatatacggaatataatacgaaatatggtacgtttccgatgccgatatttataaatcatgatggttttctagaatgtataggtataaaaccgacgaaacatacgccgataatatataaatatgatctaaatccgtaaatttcaacacaatattcacacaatctaaaacaacaactctatgcataactatactccatagtccagatggagcctgaaaattatagtaatttaaaattaaggagagatataagatagaagatggggcaaatacaaagatggctcttagcaaagtcaagttgaatgatacactcaacaaagatcaacttctgtcatccagcaaatacaccatccaacggagcacaggagatagtattgatactcctaattatgatgtgcagaaacacatcaataagttatgtggcatgttattaatcacagaagatgctaatcataaattcactgggttaataggtatgttatatgcgatgtctaggttaggaagagaagacaccataaaaatactcagagatgcgggatatcatgtaaaagcaaatggagtagatgtaacaacacatcgtcaagacattaatggaaaagaaatgaaatttgaagtgttaacattggcaagcttaacaactgaaattcaaatcaacattgagatagaatctagaaaatcctacaaaaaaatgctaaaagaaatgggagaggtagctccagaatacaggcatgactctcctgattgtgggatgataatattatgtatagcagcattagtaataactaaattagcagcaggggacagatctggtcttacagccgtgattaggagagctaataatgtcctaaaaaatgaaatgaaacgttacaaaggcttactacccaaggacatagccaacagcttctatgaagtgtttgaaaaacatccccactttatagatgtttttgttcattttggtatagcacaatcttctaccagaggtggcagtagagttgaagggatttttgcaggattgtttatgaatgcctatggtgcagggcaagtgatgttacggtggggagtcttagcaaaatcagttaaaaatattatgttaggacatgctagtgtgcaagcagaaatggaacaagttgttgaggtttatgaatatgcccaaaaattgggtggtgaagcaggattctaccatatattgaacaacccaaaagcatcattattatctttgactcaatttcctcacttctccagtgtagtattaggcaatgctgctggcctaggcataatgggagagtacagaggtacaccgaggaatcaagatctatatgatgcagcaaaggcatatgctgaacaactcaaagaaaatggtgtgattaactacagtgtactagacttgacagcagaagaactagaggctatcaaacatcagcttaatccaaaagataatgatgtagagctttgagttaataaaaaatggggcaaataaatcatcatggaaaagtttgctcctgaattccatggagaagatgcaaacaacagggctactaaattcctagaatcaataaagggcaaattcacatcacccaaagatcccaagaaaaaagatagtatcatatctgtcaactcaatagatatagaagtaaccaaagaaagccctataacatcaaattcaactattatcaacccaacaaatgagacagatgatactgcagggaacaagcccaattatcaaagaaaacctctagtaagtttcaaagaagaccctacaccaagtgataatcccttttctaaactatacaaagaaaccatagaaacatttgataacaatgaagaagaatccagctattcatacgaagaaataaatgatcagacaaacgataatataacagcaagattagataggattgatgaaaaattaagtgaaatactaggaatgcttcacacattagtagtggcaagtgcaggacctacatctgctcgggatggtataagagatgccatgattggtttaagagaagaaatgatagaaaaaatcagaactgaagcattaatgaccaatgacagattagaagctatggcaagactcaggaatgaggaaagtgaaaagatggcaaaagacacatcagatgaagtgtctctcaatccaacatcagagaaattgaacaacctattggaagggaatgatagtgacaatgatctatcacttgaagatttctgattagttaccactcttcacatcaacacacaataccaacagaagaccaacaaactaaccaacccaatcatccaaccaaacatccatccgccaatcagccaaacagccaacaaaacaaccagccaatccaaaactaaccacccggaaaaaatctataatatagttacaaaaaaaggaaagggtggggcaaatatggaaacatacgtgaacaagcttcacgaaggctccacatacacagctgctgttcaatacaatgtcttagaaaaagacgatgaccctgcatcacttacaatatgggtgcccatgttccaatcatctatgccagcagatttacttataaaagaactagctaatgtcaacatactagtgaaacaaatatccacacccaagggaccttcactaagagtcatgataaactcaagaagtgcagtgctagcacaaatgcccagcaaatttaccatatgcgctaatgtgtccttggatgaaagaagcaaactagcatatgatgtaaccacaccctgtgaaatcaaggcatgtagtctaacatgcctaaaatcaaaaaatatgttgactacagttaaagatctcactatgaagacactcaaccctacacatgatattattgctttatgtgaatttgaaaacatagtaacatcaaaaaaagtcataataccaacatacctaagatccatcagtgtcagaaataaagatctgaacacacttgaaaatataacaaccactgaattcaaaaatgctatcacaaatgcaaaaatcatcccttactcaggattactattagtcatcacagtgactgacaacaaaggagcattcaaatacataaagccacaaagtcaattcatagtagatcttggagcttacctagaaaaagaaagtatatattatgttaccacaaattggaagcacacagctacacgatttgcaatcaaacccatggaagattaacctttttcctctacatcagtgtgttaattcatacaaactttctacctacattcttcacttcaccatcacaatcacaaacactctgtggttcaaccaatcaaacaaaacttatctgaagtcccagatcatcccaagtcattgtttatcagatctagtactcaaataagttaataaaaaatatacacatggacgtccatggggcaaatgcaaacatgtttgtttttcttgttttattgccactagtctctagtcagtgtgttaatcttacaaccagaactcaattaccccctgcatacactaattctttcacacgtggtgtttattaccctgacaaagttttcagatcctcagttttacattcaactcaggacttgttcttacctttcttttccaatgttacttggttccatgctatacatgtctctgggaccaatggtactaagaggtttgataaccctgtcctaccatttaatgatggtgtttattttgcttccactgagaagtctaacataataagaggctggatttttggtactactttagattcgaagacccagtccctacttattgttaataacgctactaatgttgttattaaagtctgtgaatttcaattttgtaatgatccatttttgggtgtttattaccacaaaaacaacaaaagttggatggaaagtgagttcagagtttattctagtgcgaataattgcacttttgaatatgtctctcagccttttcttatggaccttgaaggaaaacagggtaatttcaaaaatcttagggaatttgtgtttaagaatattgatggttattttaaaatatattctaagcacacgcctattaatttagtgcgtgatctccctcagggtttttcggctttagaaccattggtagatttgccaataggtattaacatcactaggtttcaaactttacttgctttacatagaagttatttgactcctggtgattcttcttcaggttggacagctggtgctgcagcttattatgtgggttatcttcaacctaggacttttctattaaaatataatgaaaatggaaccattacagatgctgtagactgtgcacttgaccctctctcagaaacaaagtgtacgttgaaatccttcactgtagaaaaaggaatctatcaaacttctaactttagagtccaaccaacagaatctattgttagatttcctaatattacaaacttgtgcccttttggtgaagtttttaacgccaccagatttgcatctgtttatgcttggaacaggaagagaatcagcaactgtgttgctgattattctgtcctatataattccgcatcattttccacttttaagtgttatggagtgtctcctactaaattaaatgatctctgctttactaatgtctatgcagattcatttgtaattagaggtgatgaagtcagacaaatcgctccagggcaaactggaaagattgctgattataattataaattaccagatgattttacaggctgcgttatagcttggaattctaacaatcttgattctaaggttggtggtaattataattacctgtatagattgtttaggaagtctaatctcaaaccttttgagagagatatttcaactgaaatctatcaggccggtagcacaccttgtaatggtgttgaaggttttaattgttactttcctttacaatcatatggtttccaacccactaatggtgttggttaccaaccatacagagtagtagtactttcttttgaacttctacatgcaccagcaactgtttgtggacctaaaaagtctactaatttggttaaaaacaaatgtgtcaatttcaacttcaatggtttaacaggcacaggtgttcttactgagtctaacaaaaagtttctgcctttccaacaatttggcagagacattgctgacactactgatgctgtccgtgatccacagacacttgagattcttgacattacaccatgttcttttggtggtgtcagtgttataacaccaggaacaaatacttctaaccaggttgctgttctttatcaggatgttaactgcacagaagtccctgttgctattcatgcagatcaacttactcctacttggcgtgtttattctacaggttctaatgtttttcaaacacgtgcaggctgtttaataggggctgaacatgtcaacaactcatatgagtgtgacatacccattggtgcaggtatatgcgctagttatcagactcagactaattctcctcggcgggcacgtagtgtagctagtcaatccatcattgcctacactatgtcacttggtgcagaaaattcagttgcttactctaataactctattgccatacccacaaattttactattagtgttaccacagaaattctaccagtgtctatgaccaagacatcagtagattgtacaatgtacatttgtggtgattcaactgaatgcagcaatcttttgttgcaatatggcagtttttgtacacaattaaaccgtgctttaactggaatagctgttgaacaagacaaaaacacccaagaagtttttgcacaagtcaaacaaatttacaaaacaccaccaattaaagattttggtggttttaatttttcacaaatattaccagatccatcaaaaccaagcaagaggtcatttattgaagatctacttttcaacaaagtgacacttgcagatgctggcttcatcaaacaatatggtgattgccttggtgatattgctgctagagacctcatttgtgcacaaaagtttaacggccttactgttttgccacctttgctcacagatgaaatgattgctcaatacacttctgcactgttagcgggtacaatcacttctggttggacctttggtgcaggtgctgcattacaaataccatttgctatgcaaatggcttataggtttaatggtattggagttacacagaatgttctctatgagaaccaaaaattgattgccaaccaatttaatagtgctattggcaaaattcaagactcactttcttccacagcaagtgcacttggaaaacttcaagatgtggtcaaccaaaatgcacaagctttaaacacgcttgttaaacaacttagctccaattttggtgcaatttcaagtgttttaaatgatatcctttcacgtcttgacaaagttgaggctgaagtgcaaattgataggttgatcacaggcagacttcaaagtttgcagacatatgtgactcaacaattaattagagctgcagaaatcagagcttctgctaatcttgctgctactaaaatgtcagagtgtgtacttggacaatcaaaaagagttgatttttgtggaaagggctatcatcttatgtccttccctcagtcagcacctcatggtgtagtcttcttgcatgtgacttatgtccctgcacaagaaaagaacttcacaactgctcctgccatttgtcatgatggaaaagcacactttcctcgtgaaggtgtctttgtttcaaatggcacacactggtttgtaacacaaaggaatttttatgaaccacaaatcattactacagacaacacatttgtgtctggtaactgtgatgttgtaataggaattgtcaacaacacagtttatgatcctttgcaacctgaattagactcattcaaggaggagttagataaatattttaagaatcatacatcaccagatgttgatttaggtgacatctctggcattaatgcttcagttgtaaacattcaaaaagaaattgaccgcctcaatgaggttgccaagaatttaaatgaatctctcatcgatctccaagaacttggaaagtatgagcagtatataaaatggccatggtacatttggctaggttttatagctggcttgattgccatagtaatggtgacaattatgctttgctgtatgaccagttgctgtagttgtctcaagtactgtaaggccagaagcacaccaatcacactaagcaaggatcaactgagtggtataaataatattgcatttagtaactaaataaaaatagcacctaatcatgttcttacaatggtttactatctgctcatagacaacccatctatcattggattttcttaaaatctgaacttcatcgaaactcttatctataaaccatctcacttacactatttaagtagattcctagtttatagttatataaaacacaattgaatgccagtcgaccttaccatctgtaaaaatgaaaactggggcaaatatgtcacgaaggaatccttgcaaatttgaaattcgaggtcattgcttaaatggtaagaggtgtcattttagtcataattattttgaatggccaccccatgcactgcttgtaagacaaaactttatgttaaacagaatacttaagtctatggataaaagtatagataccttatcagaaataagtggagctgcagagttggacagaacagaagagtatgctcttggtgtagttggagtgctagagagttatataggatcaataaacaatataactaaacaatcagcatgtgttgccatgagcaaactcctcactgaactcaatagtgatgatatcaaaaagctgagggacaatgaagagctaaattcacccaagataagagtgtacaatactgtcatatcatatattgaaagcaacaggaaaaacaataaacaaactatccatctgttaaaaagattgccagcagacgtattgaagaaaaccatcaaaaacacattggatatccataagagcataaccatcaacaacccaaaagaatcaactgttagtgatacaaatgaccatgccaaaaataatgatactacctgacaaatatccttgtagtataacttccatactaataacaagtagatgtagagttactatgtataatcaaaagaacacactatatttcaatcaaaacaacccaaataaccatatgtactcaccgaatcaaacattcaatgaaatccattggacctctcaagaattgattgacacaattcaaaattttctacaacatctaggtattattgaggatatatatacaatatatatattagtgtcataacactcaattctaacactcaccacatcgttacattattaattcaaacaattcaagttgtgggacaaaatggatcccattattaatggaaattctgctaatgtttatctaaccgatagttatttaaaaggtgttatctctttctcagagtgtaatgctttaggaagttacatattcaatggtccttatctcaaaaatgattataccaacttaattagtagacaaaatccattaatagaacacatgaatctaaagaaactaaatataacacagtccttaatatctaagtatcataaaggtgaaataaaattagaagaacctacttattttcagtcattacttatgacatacaagagtatgacctcgtcagaacagattgctaccactaatttacttaaaaagataataagaagagctatagaaataagtgatgtcaaagtctatgctatattgaataaactagggcttaaagaaaaggacaagattaaatccaacaatggacaagatgaagacaactcagttattacgaccataatcaaagatgatatactttcagctgttaaagataatcaatctcatcttaaagcagacaaaaatcactctacaaaacaaaaagacacaatcaaaacaacactcttgaagaaattgatgtgttcaatgcaacatcctccatcatggttaatacattggtttaacttatacacaaaattaaacaacatattaacacagtatcgatcaaatgaggtaaaaaaccatgggtttacattgatagataatcaaactcttagtggatttcaatttattttgaaccaatatggttgtatagtttatcataaggaactcaaaagaattactgtgacaacctataatcaattcttgacatggaaagatattagccttagtagattaaatgtttgtttaattacatggattagtaactgcttgaacacattaaataaaagcttaggcttaagatgcggattcaataatgttatcttgacacaactattcctttatggagattgtatactaaagctatttcacaatgaggggttctacataataaaagaggtagagggatttattatgtctctaattttaaatataacagaagaagatcaattcagaaaacgattttataatagtatgctcaacaacatcacagatgctgctaataaagctcagaaaaatctgctatcaagagtatgtcatacattattagataagacagtgtccgataatataataaatggcagatggataattctattaagtaagttccttaaattaattaagcttgcaggtgacaataaccttaacaatctgagtgaactatattttttgttcagaatatttggacacccaatggtagatgaaagacaagccatggatgctgttaaaattaattgcaatgagaccaaattttacttgttaagcagtctgagtatgttaagaggtgcctttatatatagaattataaaagggtttgtaaataattacaacagatggcctactttaagaaatgctattgttttacccttaagatggttaacttactataaactaaacacttatccttctttgttggaacttacagaaagagatttgattgtgttatcaggactacgtttctatcgtgagtttcggttgcctaaaaaagtggatcttgaaatgattataaatgataaagctatatcacctcctaaaaatttgatatggactagtttccctagaaattacatgccatcacacatacaaaactatatagaacatgaaaaattaaaattttccgagagtgataaatcaagaagagtattagagtattatttaagagataacaaattcaatgaatgtgatttatacaactgtgtagttaatcaaagttatctcaacaaccctaatcatgtggtatcattgacaggcaaagaaagagaactcagtgtaggtagaatgtttgcaatgcaaccgggaatgttcagacaggttcaaatattggcagagaaaatgatagctgaaaacattttacaattctttcctgaaagtcttacaagatatggtgatctagaactacaaaaaatattagaattgaaagcaggaataagtaacaaatcaaatcgctacaatgataattacaacaattacattagtaagtgctctatcatcacagatctcagcaaattcaatcaagcatttcgatatgaaacgtcatgtatttgtagtgatgtgctggatgaactgcatggtgtacaatctctattttcctggttacatttaactattcctcatgtcacaataatatgcacatataggcatgcacccccctatataggagatcatattgtagatcttaacaatgtagatgaacaaagtggattatatagatatcacatgggtggcatcgaagggtggtgtcaaaaactgtggaccatagaagctatatcactattggatctaatatctctcaaagggaaattctcaattactgctttaattaatggtgacaatcaatcaatagatataagcaaaccaatcagactcatggaaggtcaaactcatgctcaagcagattatttgctagcattaaatagccttaaattactgtataaagagtatgcaggcataggccacaaattaaaaggaactgagacttatatatcacgagatatgcaatttatgagtaaaacaattcaacataacggtgtatattacccagctagtataaagaaagtcctaagagtgggaccgtggataaacactatacttgatgatttcaaagtgagtctagaatctataggtagtttgacacaagaattagaatatagaggtgaaagtctattatgcagtttaatatttagaaatgtatggttatataatcagattgctctacaattaaaaaatcatgcattatgtaacaataaactatatttggacatattaaaggttctgaaacacttaaaaaccttttttaatcttgataatattgatacagcattaacattgtatatgaatttacccatgttatttggtggtggtgatcccaacttgttatatcgaagtttctatagaagaactcctgacttcctcacagaggctatagttcactctgtgttcatacttagttattatacaaaccatgacttaaaagataaacttcaagatctgtcagatgatagattgaataagttcttaacatgcataatcacgtttgacaaaaaccctaatgctgaattcgtaacattgatgagagatcctcaagctttagggtctgagagacaagctaaaattactagcgaaatcaatagactggcagttacagaggttttgagtacagctccaaacaaaatattctccaaaagtgcacaacattatactactacagagatagatctaaatgatattatgcaaaatatagaacctacatatcctcatgggctaagagttgtttatgaaagtttacccttttataaagcagagaaaatagtaaatcttatatcaggtacaaaatctataactaacatactggaaaaaacttctgccatagacttaacagatattgatagagccactgagatgatgaggaaaaacataactttgcttataaggatacttccattggattgtaacagagataaaagagagatattgagtatggaaaacctaagtattactgaattaagcaaatatgttagggaaagatcttggtctttatccaatatagttggtgttacatcacccagtatcatgtatacaatggacatcaaatatactacaagcactatatctagtggcataattatagagaaatataatgttaacagtttaacacgtggtgagagaggacccactaaaccatgggttggttcatctacacaagagaaaaaaacaatgccagtttataatagacaagtcttaaccaaaaaacagagagatcaaatagatctattagcaaaattggattgggtgtatgcatctatagataacaaggatgaattcatggaagaactcagcataggaacccttgggttaacatatgaaaaggccaagaaattatttccacaatatttaagtgtcaattatttgcatcgccttacagtcagtagtagaccatgtgaattccctgcatcaataccagcttatagaacaacaaattatcactttgacactagccctattaatcgcatattaacagaaaagtatggtgatgaagatattgacatagtattccaaaactgtataagctttggccttagtttaatgtcagtagtagaacaatttactaatgtatgtcctaacagaattattctcatacctaagcttaatgagatacatttgatgaaacctcccatattcacaggtgatgttgatattcacaagttaaaacaagtgatacaaaaacagcatatgtttttaccagacaaaataagtttgactcaatatgtggaattattcttaagtaataaaacactcaaatctggatctcatgttaattctaatttaatattggcacataaaatatctgactattttcataatacttacattttaagtactaatttagctggacattggattctgattatacaacttatgaaagattctaaaggtatttttgaaaaagattggggagagggatatataactgatcatatgtttattaatttgaaagttttcttcaatgcttataagacctatctcttgtgttttcataaaggttatggcaaagcaaagctggagtgtgatatgaacacttcagatcttctatgtgtattggaattaatagacagtagttattggaagtctatgtctaaggtatttttagaacaaaaagttatcaaatacattcttagccaagatgcaagtttacatagagtaaaaggatgtcatagcttcaaattatggtttcttaaacgtcttaatgtagcagaattcacagtttgcccttgggttgttaacatagattatcatccaacacatatgaaagcaatattaacttatatagatcttgttagaatgggattgataaatatagatagaatacacattaaaaataaacacaaattcaatgatgaattttatacttctaatctcttctacattaattataacttctcagataatactcatctattaactaaacatataaggattgctaattctgaattagaaaataattacaacaaattatatcatcctacaccagaaaccctagagaatatactagccaatccgattaaaagtaatgacaaaaagacactgaatgactattgtataggtaaaaatgttgactcaataatgttaccattgttatctaataagaagcttattaaatcgtctgcaatgattagaaccaattacagcaaacaagatttgtataatttattccctatggttgtgattgatagaattatagatcattcaggcaatacagccaaatccaaccaactttacactactacttcccaccaaatatctttagtgcacaatagcacatcactttactgcatgcttccttggcatcatattaatagattcaattttgtatttagttctacaggttgtaaaattagtatagagtatattttaaaagatcttaaaattaaagatcccaattgtatagcattcataggtgaaggagcagggaatttattattgcgtacagtagtggaacttcatcctgacataagatatatttacagaagtctgaaagattgcaatgatcatagtttacctattgagtttttaaggctgtacaatggacatatcaacattgattatggtgaaaatttgaccattcctgctacagatgcaaccaacaacattcattggtcttatttacatataaagtttgctgaacctatcagtctttttgtctgtgatgccgaattgtctgtaacagtcaactggagtaaaattataatagaatggagcaagcatgtaagaaagtgcaagtactgttcctcagttaataaatgtatgttaatagtaaaatatcatgctcaagatgatattgatttcaaattagacaatataactatattaaaaacttatgtatgcttaggcagtaagttaaagggatcggaggtttacttagtccttacaataggtcctgcgaatatattcccagtatttaatgtagtacaaaatgctaaattgatactatcaagaaccaaaaatttcatcatgcctaagaaagctgataaagagtctattgatgcaaatattaaaagtttgataccctttctttgttaccctataacaaaaaaaggaattaatactgcattgtcaaaactaaagagtgttgttagtggagatatactatcatattctatagctggacgtaatgaagttttcagcaataaacttataaatcataagcatatgaacatcttaaaatggttcaatcatgttttaaatttcagatcaacagaactaaactataaccatttatatatggtagaatctacatatccttacctaagtgaattgttaaacagcttgacaaccaatgaacttaaaaaactgattaaaatcacaggtagtctgttatacaactttcataatgaataatgaataaagatcttataataaaaattcccatagctatacactaacactgtattcaattatagttattaaaaattaaaaatcgtacgattttttaaataacttttagtgaactaatcctaaagttatcattttaatcttggaggaataaatttaaaccctaatctaattggtttatatgtgtattaactaaattacgagatattagtttttgacactttttttctcgt

SEQ ID NO: 110 - protein, 1260 aa, Artificial Sequence
  Description of Artificial Sequence: Synthetic polypeptide
MFVFLVLLPLVSSQCVNLTTRTQLPPAYTNSFTRGVYYPDKVFRSSVLHSTQDLFLPFFSNVTWFHAIHVSGTNGTKRFDNPVLPFNDGVYFASTEKSNIIRGWIFGTTLDSKTQSLLIVNNATNVVIKVCEFQFCNDPFLGVYYHKNNKSWMESEFRVYSSANNCTFEYVSQPFLMDLEGKQGNFKNLREFVFKNIDGYFKIYSKHTPINLVRDLPQGFSALEPLVDLPIGINITRFQTLLALHRSYLTPGDSSSGWTAGAAAYYVGYLQPRTFLLKYNENGTITDAVDCALDPLSETKCTLKSFTVEKGIYQTSNFRVQPTESIVRFPNITNLCPFGEVFNATRFASVYAWNRKRISNCVADYSVLYNSASFSTFKCYGVSPTKLNDLCFTNVYADSFVIRGDEVRQIAPGQTGKIADYNYKLPDDFTGCVIAWNSNNLDSKVGGNYNYLYRLFRKSNLKPFERDISTEIYQAGSTPCNGVEGFNCYFPLQSYGFQPTNGVGYQPYRVVVLSFELLHAPATVCGPKKSTNLVKNKCVNFNFNGLTGTGVLTESNKKFLPFQQFGRDIADTTDAVRDPQTLEILDITPCSFGGVSVITPGTNTSNQVAVLYQDVNCTEVPVAIHADQLTPTWRVYSTGSNVFQTRAGCLIGAEHVNNSYECDIPIGAGICASYQTQTNSPRRARSVASQSIIAYTMSLGAENSVAYSNNSIAIPTNFTISVTTEILPVSMTKTSVDCTMYICGDSTECSNLLLQYGSFCTQLNRALTGIAVEQDKNTQEVFAQVKQIYKTPPIKDFGGFNFSQILPDPSKPSKRSFIEDLLFNKVTLADAGFIKQYGDCLGDIAARDLICAQKFNGLTVLPPLLTDEMIAQYTSALLAGTITSGWTFGAGAALQIPFAMQMAYRFNGIGVTQNVLYENQKLIANQFNSAIGKIQDSLSSTASALGKLQDVVNQNAQALNTLVKQLSSNFGAISSVLNDILSRLDKVEAEVQIDRLITGRLQSLQTYVTQQLIRAAEIRASANLAATKMSECVLGQSKRVDFCGKGYHLMSFPQSAPHGVVFLHVTYVPAQEKNFTTAPAICHDGKAHFPREGVFVSNGTHWFVTQRNFYEPQIITTDNTFVSGNCDVVIGIVNNTVYDPLQPELDSFKEELDKYFKNHTSPDVDLGDISGINASVVNIQKEIDRLNEVAKNLNESLIDLQELGKYEQYIIMITTIIIVIIVILLSLIAVGLLLYCKARSTPITLSKDQLSGINNIAFSN

SEQ ID NO: 111 - DNA, 3783 bp, Artificial Sequence
  Description of Artificial Sequence: Synthetic polynucleotide
atgtttgtttttcttgttttattgccactagtctctagtcagtgtgttaatcttacaaccagaactcaattaccccctgcatacactaattctttcacacgtggtgtttattaccctgacaaagttttcagatcctcagttttacattcaactcaggacttgttcttacctttcttttccaatgttacttggttccatgctatacatgtctctgggaccaatggtactaagaggtttgataaccctgtcctaccatttaatgatggtgtttattttgcttccactgagaagtctaacataataagaggctggatttttggtactactttagattcgaagacccagtccctacttattgttaataacgctactaatgttgttattaaagtctgtgaatttcaattttgtaatgatccatttttgggtgtttattaccacaaaaacaacaaaagttggatggaaagtgagttcagagtttattctagtgcgaataattgcacttttgaatatgtctctcagccttttcttatggaccttgaaggaaaacagggtaatttcaaaaatcttagggaatttgtgtttaagaatattgatggttattttaaaatatattctaagcacacgcctattaatttagtgcgtgatctccctcagggtttttcggctttagaaccattggtagatttgccaataggtattaacatcactaggtttcaaactttacttgctttacatagaagttatttgactcctggtgattcttcttcaggttggacagctggtgctgcagcttattatgtgggttatcttcaacctaggacttttctattaaaatataatgaaaatggaaccattacagatgctgtagactgtgcacttgaccctctctcagaaacaaagtgtacgttgaaatccttcactgtagaaaaaggaatctatcaaacttctaactttagagtccaaccaacagaatctattgttagatttcctaatattacaaacttgtgcccttttggtgaagtttttaacgccaccagatttgcatctgtttatgcttggaacaggaagagaatcagcaactgtgttgctgattattctgtcctatataattccgcatcattttccacttttaagtgttatggagtgtctcctactaaattaaatgatctctgctttactaatgtctatgcagattcatttgtaattagaggtgatgaagtcagacaaatcgctccagggcaaactggaaagattgctgattataattataaattaccagatgattttacaggctgcgttatagcttggaattctaacaatcttgattctaaggttggtggtaattataattacctgtatagattgtttaggaagtctaatctcaaaccttttgagagagatatttcaactgaaatctatcaggccggtagcacaccttgtaatggtgttgaaggttttaattgttactttcctttacaatcatatggtttccaacccactaatggtgttggttaccaaccatacagagtagtagtactttcttttgaacttctacatgcaccagcaactgtttgtggacctaaaaagtctactaatttggttaaaaacaaatgtgtcaatttcaacttcaatggtttaacaggcacaggtgttcttactgagtctaacaaaaagtttctgcctttccaacaatttggcagagacattgctgacactactgatgctgtccgtgatccacagacacttgagattcttgacattacaccatgttcttttggtggtgtcagtgttataacaccaggaacaaatacttctaaccaggttgctgttctttatcaggatgttaactgcacagaagtccctgttgctattcatgcagatcaacttactcctacttggcgtgtttattctacaggttctaatgtttttcaaacacgtgcaggctgtttaataggggctgaacatgtcaacaactcatatgagtgtgacatacccattggtgcaggtatatgcgctagttatcagactcagactaattctcctcggcgggcacgtagtgtagctagtcaatccatcattgcctacactatgtcacttggtgcagaaaattcagttgcttactctaataactctattgccatacccacaaattttactattagtgttaccacagaaattctaccagtgtctatgaccaagacatcagtagattgtacaatgtacatttgtggtgattcaactgaatgcagcaatcttttgttgcaatatggcagtttttgtacacaattaaaccgtgctttaactggaatagctgttgaacaagacaaaaacacccaagaagtttttgcacaagtcaaacaaatttacaaaacaccaccaattaaagattttggtggttttaatttttcacaaatattaccagatccatcaaaaccaagcaagaggtcatttattgaagatctacttttcaacaaagtgacacttgcagatgctggcttcatcaaacaatatggtgattgccttggtgatattgctgctagagacctcatttgtgcacaaaagtttaacggccttactgttttgccacctttgctcacagatgaaatgattgctcaatacacttctgcactgttagcgggtacaatcacttctggttggacctttggtgcaggtgctgcattacaaataccatttgctatgcaaatggcttataggtttaatggtattggagttacacagaatgttctctatgagaaccaaaaattgattgccaaccaatttaatagtgctattggcaaaattcaagactcactttcttccacagcaagtgcacttggaaaacttcaagatgtggtcaaccaaaatgcacaagctttaaacacgcttgttaaacaacttagctccaattttggtgcaatttcaagtgttttaaatgatatcctttcacgtcttgacaaagttgaggctgaagtgcaaattgataggttgatcacaggcagacttcaaagtttgcagacatatgtgactcaacaattaattagagctgcagaaatcagagcttctgctaatcttgctgctactaaaatgtcagagtgtgtacttggacaatcaaaaagagttgatttttgtggaaagggctatcatcttatgtccttccctcagtcagcacctcatggtgtagtcttcttgcatgtgacttatgtccctgcacaagaaaagaacttcacaactgctcctgccatttgtcatgatggaaaagcacactttcctcgtgaaggtgtctttgtttcaaatggcacacactggtttgtaacacaaaggaatttttatgaaccacaaatcattactacagacaacacatttgtgtctggtaactgtgatgttgtaataggaattgtcaacaacacagtttatgatcctttgcaacctgaattagactcattcaaggaggagttagataaatattttaagaatcatacatcaccagatgttgatttaggtgacatctctggcattaatgcttcagttgtaaacattcaaaaagaaattgaccgcctcaatgaggttgccaagaatttaaatgaatctctcatcgatctccaagaacttggaaagtatgagcagtatataatcatgataactactataattatagtgattatagtaatattgttatcattaattgctgttggactgctcctatactgtaaggccagaagcacaccaatcacactaagcaaggatcaactgagtggtataaataatattgcatttagtaactaa

SEQ ID NO: 112 - DNA, 16659 bp, Artificial Sequence
  Description of Artificial Sequence: Synthetic polynucleotide
acgcgaaaaaatgcgtacaacaaacttgcataaaccaaaaaaatggggcaaataagaatttgataagtaccacttaaatttaactcccttgcttagcgatggtgagcgagctgattaaggagaacatgcacatgaagctgtacatggagggcaccgtgaacaaccaccacttcaagtgcacatccgagggcgaaggcaagccctacgagggcacccagaccatgagaatcaaggcggtcgagggcggccctctccccttcgccttcgacatcctggctaccagcttcatgtacggcagcaaaaccttcatcaaccacacccagggcatccccgacttctttaagcagtccttccccgagggcttcacatgggagagagtcaccacatacgaagacgggggcgtgctgaccgctacccaggacaccagcctccaggacggctgcctcatctacaacgtcaagatcagaggggtgaacttcccatccaacggccctgtgatgcagaagaaaacactcggctgggaggcctccaccgagaccctgtaccccgctgacggcggcctggaaggcagagccgacatggccctgaagctcgtgggcgggggccacctgatctgcaacttgaagaccacatacagatccaagaaacccgctaagaacctcaagatgcccggcgtctactatgtggacagaagactggaaagaatcaaggaggccgacaaagagacctacgtcgagcagcacgaggtggctgtggccagatactgcgacctccctagcaaactggggcacagatgagtattcaattatagttattaaaaacttaacagaagacaaaaatggggcaaataagaatttgataagtaccacttaaatttaactcccttgcttagcgatgggttcgaattcgctatcgatgataaaagtacgtctacaaaatctatttgataatgatgaagtagcgctactaaaaataacgtgttatacggataaactaatacatctaacgaatgcgctagcgaaagcggtaatacatacgataaaactaaatggtatagtatttgtacatgtaataacgtcgtcggatatatgtccgaataataatatagtagtaaaatcgaattttacgacgatgccggtactacaaaatggtggttatatatgggaaatgatggaactaacgcattgttcgcaaccgaatggtctactagatgataattgtgaaataaaattttcgaaaaaactatcggattcgacgatgacgaattatatgaatcaactatcggaactactaggttttgatctaaatccgtaaattataattaatatcaactagcaaatcaatgtcactaacaccattagttaatataaaacttaacagaagacaaaaatggggcaaataaatcaattcagccaacccaaccatggatacgacgcataatgataatacgccgcaacgtctaatgataacggatatgcgtccgctatcgctagaaacgataataacgtcgctaacgcgtgatataataacgcataaatttatatatctaataaatcatgaatgtatagtacgtaaactagatgaacgtcaagcgacgtttacgtttctagtaaattatgaaatgaaactactacataaagtaggttcgacgaaatataaaaaatatacggaatataatacgaaatatggtacgtttccgatgccgatatttataaatcatgatggttttctagaatgtataggtataaaaccgacgaaacatacgccgataatatataaatatgatctaaatccgtaaatttcaacacaatattcacacaatctaaaacaacaactctatgcataactatactccatagtccagatggagcctgaaaattatagtaatttaaaattaaggagagatataagatagaagatggggcaaatacaaagatggctcttagcaaagtcaagttgaatgatacactcaacaaagatcaacttctgtcatccagcaaatacaccatccaacggagcacaggagatagtattgatactcctaattatgatgtgcagaaacacatcaataagttatgtggcatgttattaatcacagaagatgctaatcataaattcactgggttaataggtatgttatatgcgatgtctaggttaggaagagaagacaccataaaaatactcagagatgcgggatatcatgtaaaagcaaatggagtagatgtaacaacacatcgtcaagacattaatggaaaagaaatgaaatttgaagtgttaacattggcaagcttaacaactgaaattcaaatcaacattgagatagaatctagaaaatcctacaaaaaaatgctaaaagaaatgggagaggtagctccagaatacaggcatgactctcctgattgtgggatgataatattatgtatagcagcattagtaataactaaattagcagcaggggacagatctggtcttacagccgtgattaggagagctaataatgtcctaaaaaatgaaatgaaacgttacaaaggcttactacccaaggacatagccaacagcttctatgaagtgtttgaaaaacatccccactttatagatgtttttgttcattttggtatagcacaatcttctaccagaggtggcagtagagttgaagggatttttgcaggattgtttatgaatgcctatggtgcagggcaagtgatgttacggtggggagtcttagcaaaatcagttaaaaatattatgttaggacatgctagtgtgcaagcagaaatggaacaagttgttgaggtttatgaatatgcccaaaaattgggtggtgaagcaggattctaccatatattgaacaacccaaaagcatcattattatctttgactcaatttcctcacttctccagtgtagtattaggcaatgctgctggcctaggcataatgggagagtacagaggtacaccgaggaatcaagatctatatgatgcagcaaaggcatatgctgaacaactcaaagaaaatggtgtgattaactacagtgtactagacttgacagcagaagaactagaggctatcaaacatcagcttaatccaaaagataatgatgtagagctttgagttaataaaaaatggggcaaataaatcatcatggaaaagtttgctcctgaattccatggagaagatgcaaacaacagggctactaaattcctagaatcaataaagggcaaattcacatcacccaaagatcccaagaaaaaagatagtatcatatctgtcaactcaatagatatagaagtaaccaaagaaagccctataacatcaaattcaactattatcaacccaacaaatgagacagatgatactgcagggaacaagcccaattatcaaagaaaacctctagtaagtttcaaagaagaccctacaccaagtgataatcccttttctaaactatacaaagaaaccatagaaacatttgataacaatgaagaagaatccagctattcatacgaagaaataaatgatcagacaaacgataatataacagcaagattagataggattgatgaaaaattaagtgaaatactaggaatgcttcacacattagtagtggcaagtgcaggacctacatctgctcgggatggtataagagatgccatgattggtttaagagaagaaatgatagaaaaaatcagaactgaagcattaatgaccaatgacagattagaagctatggcaagactcaggaatgaggaaagtgaaaagatggcaaaagacacatcagatgaagtgtctctcaatccaacatcagagaaattgaacaacctattggaagggaatgatagtgacaatgatctatcacttgaagatttctgattagttaccactcttcacatcaacacacaataccaacagaagaccaacaaactaaccaacccaatcatccaaccaaacatccatccgccaatcagccaaacagccaacaaaacaaccagccaatccaaaactaaccacccggaaaaaatctataatatagttacaaaaaaaggaaagggtggggcaaatatggaaacatacgtgaacaagcttcacgaaggctccacatacacagctgctgttcaatacaatgtcttagaaaaagacgatgaccctgcatcacttacaatatgggtgcccatgttccaatcatctatgccagcagatttacttataaaagaactagctaatgtcaacatactagtgaaacaaatatccacacccaagggaccttcactaagagtcatgataaactcaagaagtgcagtgctagcacaaatgcccagcaaatttaccatatgcgctaatgtgtccttggatgaaagaagcaaactagcatatgatgtaaccacaccctgtgaaatcaaggcatgtagtctaacatgcctaaaatcaaaaaatatgttgactacagttaaagatctcactatgaagacactcaaccctacacatgatattattgctttatgtgaatttgaaaacatagtaacatcaaaaaaagtcataataccaacatacctaagatccatcagtgtcagaaataaagatctgaacacacttgaaaatataacaaccactgaattcaaaaatgctatcacaaatgcaaaaatcatcccttactcaggattactattagtcatcacagtgactgacaacaaaggagcattcaaatacataaagccacaaagtcaattcatagtagatcttggagcttacctagaaaaagaaagtatatattatgttaccacaaattggaagcacacagctacacgatttgcaatcaaacccatggaagattaacctttttcctctacatcagtgtgttaattcatacaaactttctacctacattcttcacttcaccatcacaatcacaaacactctgtggttcaaccaatcaaacaaaacttatctgaagtcccagatcatcccaagtcattgtttatcagatctagtactcaaataagttaataaaaaatatacacatggacgtccatggggcaaatgcaaacatgtttgtttttcttgttttattgccactagtctctagtcagtgtgttaatcttacaaccagaactcaattaccccctgcatacactaattctttcacacgtggtgtttattaccctgacaaagttttcagatcctcagttttacattcaactcaggacttgttcttacctttcttttccaatgttacttggttccatgctatacatgtctctgggaccaatggtactaagaggtttgataaccctgtcctaccatttaatgatggtgtttattttgcttccactgagaagtctaacataataagaggctggatttttggtactactttagattcgaagacccagtccctacttattgttaataacgctactaatgttgttattaaagtctgtgaatttcaattttgtaatgatccatttttgggtgtttattaccacaaaaacaacaaaagttggatggaaagtgagttcagagtttattctagtgcgaataattgcacttttgaatatgtctctcagccttttcttatggaccttgaaggaaaacagggtaatttcaaaaatcttagggaatttgtgtttaagaatattgatggttattttaaaatatattctaagcacacgcctattaatttagtgcgtgatctccctcagggtttttcggctttagaaccattggtagatttgccaataggtattaacatcactaggtttcaaactttacttgctttacatagaagttatttgactcctggtgattcttcttcaggttggacagctggtgctgcagcttattatgtgggttatcttcaacctaggacttttctattaaaatataatgaaaatggaaccattacagatgctgtagactgtgcacttgaccctctctcagaaacaaagtgtacgttgaaatccttcactgtagaaaaaggaatctatcaaacttctaactttagagtccaaccaacagaatctattgttagatttcctaatattacaaacttgtgcccttttggtgaagtttttaacgccaccagatttgcatctgtttatgcttggaacaggaagagaatcagcaactgtgttgctgattattctgtcctatataattccgcatcattttccacttttaagtgttatggagtgtctcctactaaattaaatgatctctgctttactaatgtctatgcagattcatttgtaattagaggtgatgaagtcagacaaatcgctccagggcaaactggaaagattgctgattataattataaattaccagatgattttacaggctgcgttatagcttggaattctaacaatcttgattctaaggttggtggtaattataattacctgtatagattgtttaggaagtctaatctcaaaccttttgagagagatatttcaactgaaatctatcaggccggtagcacaccttgtaatggtgttgaaggttttaattgttactttcctttacaatcatatggtttccaacccactaatggtgttggttaccaaccatacagagtagtagtactttcttttgaacttctacatgcaccagcaactgtttgtggacctaaaaagtctactaatttggttaaaaacaaatgtgtcaatttcaacttcaatggtttaacaggcacaggtgttcttactgagtctaacaaaaagtttctgcctttccaacaatttggcagagacattgctgacactactgatgctgtccgtgatccacagacacttgagattcttgacattacaccatgttcttttggtggtgtcagtgttataacaccaggaacaaatacttctaaccaggttgctgttctttatcaggatgttaactgcacagaagtccctgttgctattcatgcagatcaacttactcctacttggcgtgtttattctacaggttctaatgtttttcaaacacgtgcaggctgtttaataggggctgaacatgtcaacaactcatatgagtgtgacatacccattggtgcaggtatatgcgctagttatcagactcagactaattctcctcggcgggcacgtagtgtagctagtcaatccatcattgcctacactatgtcacttggtgcagaaaattcagttgcttactctaataactctattgccatacccacaaattttactattagtgttaccacagaaattctaccagtgtctatgaccaagacatcagtagattgtacaatgtacatttgtggtgattcaactgaatgcagcaatcttttgttgcaatatggcagtttttgtacacaattaaaccgtgctttaactggaatagctgttgaacaagacaaaaacacccaagaagtttttgcacaagtcaaacaaatttacaaaacaccaccaattaaagattttggtggttttaatttttcacaaatattaccagatccatcaaaaccaagcaagaggtcatttattgaagatctacttttcaacaaagtgacacttgcagatgctggcttcatcaaacaatatggtgattgccttggtgatattgctgctagagacctcatttgtgcacaaaagtttaacggccttactgttttgccacctttgctcacagatgaaatgattgctcaatacacttctgcactgttagcgggtacaatcacttctggttggacctttggtgcaggtgctgcattacaaataccatttgctatgcaaatggcttataggtttaatggtattggagttacacagaatgttctctatgagaaccaaaaattgattgccaaccaatttaatagtgctattggcaaaattcaagactcactttcttccacagcaagtgcacttggaaaacttcaagatgtggtcaaccaaaatgcacaagctttaaacacgcttgttaaacaacttagctccaattttggtgcaatttcaagtgttttaaatgatatcctttcacgtcttgacaaagttgaggctgaagtgcaaattgataggttgatcacaggcagacttcaaagtttgcagacatatgtgactcaacaattaattagagctgcagaaatcagagcttctgctaatcttgctgctactaaaatgtcagagtgtgtacttggacaatcaaaaagagttgatttttgtggaaagggctatcatcttatgtccttccctcagtcagcacctcatggtgtagtcttcttgcatgtgacttatgtccctgcacaagaaaagaacttcacaactgctcctgccatttgtcatgatggaaaagcacactttcctcgtgaaggtgtctttgtttcaaatggcacacactggtttgtaacacaaaggaatttttatgaaccacaaatcattactacagacaacacatttgtgtctggtaactgtgatgttgtaataggaattgtcaacaacacagtttatgatcctttgcaacctgaattagactcattcaaggaggagttagataaatattttaagaatcatacatcaccagatgttgatttaggtgacatctctggcattaatgcttcagttgtaaacattcaaaaagaaattgaccgcctcaatgaggttgccaagaatttaaatgaatctctcatcgatctccaagaacttggaaagtatgagcagtatataatcatgataactactataattatagtgattatagtaatattgttatcattaattgctgttggactgctcctatactgtaaggccagaagcacaccaatcacactaagcaaggatcaactgagtggtataaataatattgcatttagtaactaaataaaaatagcacctaatcatgttcttacaatggtttactatctgctcatagacaacccatctatcattggattttcttaaaatctgaacttcatcgaaactcttatctataaaccatctcacttacactatttaagtagattcctagtttatagttatataaaacacaattgaatgccagtcgaccttaccatctgtaaaaatgaaaactggggcaaatatgtcacgaaggaatccttgcaaatttgaaattcgaggtcattgcttaaatggtaagaggtgtcattttagtcataattattttgaatggccaccccatgcactgcttgtaagacaaaactttatgttaaacagaatacttaagtctatggataaaagtatagataccttatcagaaataagtggagctgcagagttggacagaacagaagagtatgctcttggtgtagttggagtgctagagagttatataggatcaataaacaatataactaaacaatcagcatgtgttgccatgagcaaactcctcactgaactcaatagtgatgatatcaaaaagctgagggacaatgaagagctaaattcacccaagataagagtgtacaatactgtcatatcatatattgaaagcaacaggaaaaacaataaacaaactatccatctgttaaaaagattgccagcagacgtattgaagaaaaccatcaaaaacacattggatatccataagagcataaccatcaacaacccaaaagaatcaactgttagtgatacaaatgaccatgccaaaaataatgatactacctgacaaatatccttgtagtataacttccatactaataacaagtagatgtagagttactatgtataatcaaaagaacacactatatttcaatcaaaacaacccaaataaccatatgtactcaccgaatcaaacattcaatgaaatccattggacctctcaagaattgattgacacaattcaaaattttctacaacatctaggtattattgaggatatatatacaatatatatattagtgtcataacactcaattctaacactcaccacatcgttacattattaattcaaacaattcaagttgtgggacaaaatggatcccattattaatggaaattctgctaatgtttatctaaccgatagttatttaaaaggtgttatctctttctcagagtgtaatgctttaggaagttacatattcaatggtccttatctcaaaaatgattataccaacttaattagtagacaaaatccattaatagaacacatgaatctaaagaaactaaatataacacagtccttaatatctaagtatcataaaggtgaaataaaattagaagaacctacttattttcagtcattacttatgacatacaagagtatgacctcgtcagaacagattgctaccactaatttacttaaaaagataataagaagagctatagaaataagtgatgtcaaagtctatgctatattgaataaactagggcttaaagaaaaggacaagattaaatccaacaatggacaagatgaagacaactcagttattacgaccataatcaaagatgatatactttcagctgttaaagataatcaatctcatcttaaagcagacaaaaatcactctacaaaacaaaaagacacaatcaaaacaacactcttgaagaaattgatgtgttcaatgcaacatcctccatcatggttaatacattggtttaacttatacacaaaattaaacaacatattaacacagtatcgatcaaatgaggtaaaaaaccatgggtttacattgatagataatcaaactcttagtggatttcaatttattttgaaccaatatggttgtatagtttatcataaggaactcaaaagaattactgtgacaacctataatcaattcttgacatggaaagatattagccttagtagattaaatgtttgtttaattacatggattagtaactgcttgaacacattaaataaaagcttaggcttaagatgcggattcaataatgttatcttgacacaactattcctttatggagattgtatactaaagctatttcacaatgaggggttctacataataaaagaggtagagggatttattatgtctctaattttaaatataacagaagaagatcaattcagaaaacgattttataatagtatgctcaacaacatcacagatgctgctaataaagctcagaaaaatctgctatcaagagtatgtcatacattattagataagacagtgtccgataatataataaatggcagatggataattctattaagtaagttccttaaattaattaagcttgcaggtgacaataaccttaacaatctgagtgaactatattttttgttcagaatatttggacacccaatggtagatgaaagacaagccatggatgctgttaaaattaattgcaatgagaccaaattttacttgttaagcagtctgagtatgttaagaggtgcctttatatatagaattataaaagggtttgtaaataattacaacagatggcctactttaagaaatgctattgttttacccttaagatggttaacttactataaactaaacacttatccttctttgttggaacttacagaaagagatttgattgtgttatcaggactacgtttctatcgtgagtttcggttgcctaaaaaagtggatcttgaaatgattataaatgataaagctatatcacctcctaaaaatttgatatggactagtttccctagaaattacatgccatcacacatacaaaactatatagaacatgaaaaattaaaattttccgagagtgataaatcaagaagagtattagagtattatttaagagataacaaattcaatgaatgtgatttatacaactgtgtagttaatcaaagttatctcaacaaccctaatcatgtggtatcattgacaggcaaagaaagagaactcagtgtaggtagaatgtttgcaatgcaaccgggaatgttcagacaggttcaaatattggcagagaaaatgatagctgaaaacattttacaattctttcctgaaagtcttacaagatatggtgatctagaactacaaaaaatattagaattgaaagcaggaataagtaacaaatcaaatcgctacaatgataattacaacaattacattagtaagtgctctatcatcacagatctcagcaaattcaatcaagcatttcgatatgaaacgtcatgtatttgtagtgatgtgctggatgaactgcatggtgtacaatctctattttcctggttacatttaactattcctcatgtcacaataatatgcacatataggcatgcacccccctatataggagatcatattgtagatcttaacaatgtagatgaacaaagtggattatatagatatcacatgggtggcatcgaagggtggtgtcaaaaactgtggaccatagaagctatatcactattggatctaatatctctcaaagggaaattctcaattactgctttaattaatggtgacaatcaatcaatagatataagcaaaccaatcagactcatggaaggtcaaactcatgctcaagcagattatttgctagcattaaatagccttaaattactgtataaagagtatgcaggcataggccacaaattaaaaggaactgagacttatatatcacgagatatgcaatttatgagtaaaacaattcaacataacggtgtatattacccagctagtataaagaaagtcctaagagtgggaccgtggataaacactatacttgatgatttcaaagtgagtctagaatctataggtagtttgacacaagaattagaatatagaggtgaaagtctattatgcagtttaatatttagaaatgtatggttatataatcagattgctctacaattaaaaaatcatgcattatgtaacaataaactatatttggacatattaaaggttctgaaacacttaaaaaccttttttaatcttgataatattgatacagcattaacattgtatatgaatttacccatgttatttggtggtggtgatcccaacttgttatatcgaagtttctatagaagaactcctgacttcctcacagaggctatagttcactctgtgttcatacttagttattatacaaaccatgacttaaaagataaacttcaagatctgtcagatgatagattgaataagttcttaacatgcataatcacgtttgacaaaaaccctaatgctgaattcgtaacattgatgagagatcctcaagctttagggtctgagagacaagctaaaattactagcgaaatcaatagactggcagttacagaggttttgagtacagctccaaacaaaatattctccaaaagtgcacaacattatactactacagagatagatctaaatgatattatgcaaaatatagaacctacatatcctcatgggctaagagttgtttatgaaagtttacccttttataaagcagagaaaatagtaaatcttatatcaggtacaaaatctataactaacatactggaaaaaacttctgccatagacttaacagatattgatagagccactgagatgatgaggaaaaacataactttgcttataaggatacttccattggattgtaacagagataaaagagagatattgagtatggaaaacctaagtattactgaattaagcaaatatgttagggaaagatcttggtctttatccaatatagttggtgttacatcacccagtatcatgtatacaatggacatcaaatatactacaagcactatatctagtggcataattatagagaaatataatgttaacagtttaacacgtggtgagagaggacccactaaaccatgggttggttcatctacacaagagaaaaaaacaatgccagtttataatagacaagtcttaaccaaaaaacagagagatcaaatagatctattagcaaaattggattgggtgtatgcatctatagataacaaggatgaattcatggaagaactcagcataggaacccttgggttaacatatgaaaaggccaagaaattatttccacaatatttaagtgtcaattatttgcatcgccttacagtcagtagtagaccatgtgaattccctgcatcaataccagcttatagaacaacaaattatcactttgacactagccctattaatcgcatattaacagaaaagtatggtgatgaagatattgacatagtattccaaaactgtataagctttggccttagtttaatgtcagtagtagaacaatttactaatgtatgtcctaacagaattattctcatacctaagcttaatgagatacatttgatgaaacctcccatattcacaggtgatgttgatattcacaagttaaaacaagtgatacaaaaacagcatatgtttttaccagacaaaataagtttgactcaatatgtggaattattcttaagtaataaaacactcaaatctggatctcatgttaattctaatttaatattggcacataaaatatctgactattttcataatacttacattttaagtactaatttagctggacattggattctgattatacaacttatgaaagattctaaaggtatttttgaaaaagattggggagagggatatataactgatcatatgtttattaatttgaaagttttcttcaatgcttataagacctatctcttgtgttttcataaaggttatggcaaagcaaagctggagtgtgatatgaacacttcagatcttctatgtgtattggaattaatagacagtagttattggaagtctatgtctaaggtatttttagaacaaaaagttatcaaatacattcttagccaagatgcaagtttacatagagtaaaaggatgtcatagcttcaaattatggtttcttaaacgtcttaatgtagcagaattcacagtttgcccttgggttgttaacatagattatcatccaacacatatgaaagcaatattaacttatatagatcttgttagaatgggattgataaatatagatagaatacacattaaaaataaacacaaattcaatgatgaattttatacttctaatctcttctacattaattataacttctcagataatactcatctattaactaaacatataaggattgctaattctgaattagaaaataattacaacaaattatatcatcctacaccagaaaccctagagaatatactagccaatccgattaaaagtaatgacaaaaagacactgaatgactattgtataggtaaaaatgttgactcaataatgttaccattgttatctaataagaagcttattaaatcgtctgcaatgattagaaccaattacagcaaacaagatttgtataatttattccctatggttgtgattgatagaattatagatcattcaggcaatacagccaaatccaaccaactttacactactacttcccaccaaatatctttagtgcacaatagcacatcactttactgcatgcttccttggcatcatattaatagattcaattttgtatttagttctacaggttgtaaaattagtatagagtatattttaaaagatcttaaaattaaagatcccaattgtatagcattcataggtgaaggagcagggaatttattattgcgtacagtagtggaacttcatcctgacataagatatatttacagaagtctgaaagattgcaatgatcatagtttacctattgagtttttaaggctgtacaatggacatatcaacattgattatggtgaaaatttgaccattcctgctacagatgcaaccaacaacattcattggtcttatttacatataaagtttgctgaacctatcagtctttttgtctgtgatgccgaattgtctgtaacagtcaactggagtaaaattataatagaatggagcaagcatgtaagaaagtgcaagtactgttcctcagttaataaatgtatgttaatagtaaaatatcatgctcaagatgatattgatttcaaattagacaatataactatattaaaaacttatgtatgcttaggcagtaagttaaagggatcggaggtttacttagtccttacaataggtcctgcgaatatattcccagtatttaatgtagtacaaaatgctaaattgatactatcaagaaccaaaaatttcatcatgcctaagaaagctgataaagagtctattgatgcaaatattaaaagtttgataccctttctttgttaccctataacaaaaaaaggaattaatactgcattgtcaaaactaaagagtgttgttagtggagatatactatcatattctatagctggacgtaatgaagttttcagcaataaacttataaatcataagcatatgaacatcttaaaatggttcaatcatgttttaaatttcagatcaacagaactaaactataaccatttatatatggtagaatctacatatccttacctaagtgaattgttaaacagcttgacaaccaatgaacttaaaaaactgattaaaatcacaggtagtctgttatacaactttcataatgaataatgaataaagatcttataataaaaattcccatagctatacactaacactgtattcaattatagttattaaaaattaaaaatcgtacgattttttaaataacttttagtgaactaatcctaaagttatcattttaatcttggaggaataaatttaaaccctaatctaattggtttatatgtgtattaactaaattacgagatattagtttttgacactttttttctcgt

SEQ ID NO: 113 - DNA, 15863 bp, Artificial Sequence
  Description of Artificial Sequence: Synthetic polynucleotide
acgcgaaaaaatgcgtacaacaaacttgcataaaccaaaaaaatggggcaaataagaatttgataagtaccacttaaatttaactcccttgcttagcgatgggttcgaattcgctatcgatgataaaagtacgtctacaaaatctatttgataatgatgaagtagcgctactaaaaataacgtgttatacggataaactaatacatctaacgaatgcgctagcgaaagcggtaatacatacgataaaactaaatggtatagtatttgtacatgtaataacgtcgtcggatatatgtccgaataataatatagtagtaaaatcgaattttacgacgatgccggtactacaaaatggtggttatatatgggaaatgatggaactaacgcattgttcgcaaccgaatggtctactagatgataattgtgaaataaaattttcgaaaaaactatcggattcgacgatgacgaattatatgaatcaactatcggaactactaggttttgatctaaatccgtaaattataattaatatcaactagcaaatcaatgtcactaacaccattagttaatataaaacttaacagaagacaaaaatggggcaaataaatcaattcagccaacccaaccatggatacgacgcataatgataatacgccgcaacgtctaatgataacggatatgcgtccgctatcgctagaaacgataataacgtcgctaacgcgtgatataataacgcataaatttatatatctaataaatcatgaatgtatagtacgtaaactagatgaacgtcaagcgacgtttacgtttctagtaaattatgaaatgaaactactacataaagtaggttcgacgaaatataaaaaatatacggaatataatacgaaatatggtacgtttccgatgccgatatttataaatcatgatggttttctagaatgtataggtataaaaccgacgaaacatacgccgataatatataaatatgatctaaatccgtaaatttcaacacaatattcacacaatctaaaacaacaactctatgcataactatactccatagtccagatggagcctgaaaattatagtaatttaaaattaaggagagatataagatagaagatggggcaaatacaaagatggctcttagcaaagtcaagttgaatgatacactcaacaaagatcaacttctgtcatccagcaaatacaccatccaacggagcacaggagatagtattgatactcctaattatgatgtgcagaaacacatcaataagttatgtggcatgttattaatcacagaagatgctaatcataaattcactgggttaataggtatgttatatgcgatgtctaggttaggaagagaagacaccataaaaatactcagagatgcgggatatcatgtaaaagcaaatggagtagatgtaacaacacatcgtcaagacattaatggaaaagaaatgaaatttgaagtgttaacattggcaagcttaacaactgaaattcaaatcaacattgagatagaatctagaaaatcctacaaaaaaatgctaaaagaaatgggagaggtagctccagaatacaggcatgactctcctgattgtgggatgataatattatgtatagcagcattagtaataactaaattagcagcaggggacagatctggtcttacagccgtgattaggagagctaataatgtcctaaaaaatgaaatgaaacgttacaaaggcttactacccaaggacatagccaacagcttctatgaagtgtttgaaaaacatccccactttatagatgtttttgttcattttggtatagcacaatcttctaccagaggtggcagtagagttgaagggatttttgcaggattgtttatgaatgcctatggtgcagggcaagtgatgttacggtggggagtcttagcaaaatcagttaaaaatattatgttaggacatgctagtgtgcaagcagaaatggaacaagttgttgaggtttatgaatatgcccaaaaattgggtggtgaagcaggattctaccatatattgaacaacccaaaagcatcattattatctttgactcaatttcctcacttctccagtgtagtattaggcaatgctgctggcctaggcataatgggagagtacagaggtacaccgaggaatcaagatctatatgatgcagcaaaggcatatgctgaacaactcaaagaaaatggtgtgattaactacagtgtactagacttgacagcagaagaactagaggctatcaaacatcagcttaatccaaaagataatgatgtagagctttgagttaataaaaaatggggcaaataaatcatcatggaaaagtttgctcctgaattccatggagaagatgcaaacaacagggctactaaattcctagaatcaataaagggcaaattcacatcacccaaagatcccaagaaaaaagatagtatcatatctgtcaactcaatagatatagaagtaaccaaagaaagccctataacatcaaattcaactattatcaacccaacaaatgagacagatgatactgcagggaacaagcccaattatcaaagaaaacctctagtaagtttcaaagaagaccctacaccaagtgataatcccttttctaaactatacaaagaaaccatagaaacatttgataacaatgaagaagaatccagctattcatacgaagaaataaatgatcagacaaacgataatataacagcaagattagataggattgatgaaaaattaagtgaaatactaggaatgcttcacacattagtagtggcaagtgcaggacctacatctgctcgggatggtataagagatgccatgattggtttaagagaagaaatgatagaaaaaatcagaactgaagcattaatgaccaatgacagattagaagctatggcaagactcaggaatgaggaaagtgaaaagatggcaaaagacacatcagatgaagtgtctctcaatccaacatcagagaaattgaacaacctattggaagggaatgatagtgacaatgatctatcacttgaagatttctgattagttaccactcttcacatcaacacacaataccaacagaagaccaacaaactaaccaacccaatcatccaaccaaacatccatccgccaatcagccaaacagccaacaaaacaaccagccaatccaaaactaaccacccggaaaaaatctataatatagttacaaaaaaaggaaagggtggggcaaatatggaaacatacgtgaacaagcttcacgaaggctccacatacacagctgctgttcaatacaatgtcttagaaaaagacgatgaccctgcatcacttacaatatgggtgcccatgttccaatcatctatgccagcagatttacttataaaagaactagctaatgtcaacatactagtgaaacaaatatccacacccaagggaccttcactaagagtcatgataaactcaagaagtgcagtgctagcacaaatgcccagcaaatttaccatatgcgctaatgtgtccttggatgaaagaagcaaactagcatatgatgtaaccacaccctgtgaaatcaaggcatgtagtctaacatgcctaaaatcaaaaaatatgttgactacagttaaagatctcactatgaagacactcaaccctacacatgatattattgctttatgtgaatttgaaaacatagtaacatcaaaaaaagtcataataccaacatacctaagatccatcagtgtcagaaataaagatctgaacacacttgaaaatataacaaccactgaattcaaaaatgctatcacaaatgcaaaaatcatcccttactcaggattactattagtcatcacagtgactgacaacaaaggagcattcaaatacataaagccacaaagtcaattcatagtagatcttggagcttacctagaaaaagaaagtatatattatgttaccacaaattggaagcacacagctacacgatttgcaatcaaacccatggaagattaacctttttcctctacatcagtgtgttaattcatacaaactttctacctacattcttcacttcaccatcacaatcacaaacactctgtggttcaaccaatcaaacaaaacttatctgaagtcccagatcatcccaagtcattgtttatcagatctagtactcaaataagttaataaaaaatatacacatggacgtccatggggcaaatgcaaacatgtttgtttttcttgttttattgccactagtctctagtcagtgtgttaatcttacaaccagaactcaattaccccctgcatacactaattctttcacacgtggtgtttattaccctgacaaagttttcagatcctcagttttacattcaactcaggacttgttcttacctttcttttccaatgttacttggttccatgctatacatgtctctgggaccaatggtactaagaggtttgataaccctgtcctaccatttaatgatggtgtttattttgcttccactgagaagtctaacataataagaggctggatttttggtactactttagattcgaagacccagtccctacttattgttaataacgctactaatgttgttattaaagtctgtgaatttcaattttgtaatgatccatttttgggtgtttattaccacaaaaacaacaaaagttggatggaaagtgagttcagagtttattctagtgcgaataattgcacttttgaatatgtctctcagccttttcttatggaccttgaaggaaaacagggtaatttcaaaaatcttagggaatttgtgtttaagaatattgatggttattttaaaatatattctaagcacacgcctattaatttagtgcgtgatctccctcagggtttttcggctttagaaccattggtagatttgccaataggtattaacatcactaggtttcaaactttacttgctttacatagaagttatttgactcctggtgattcttcttcaggttggacagctggtgctgcagcttattatgtgggttatcttcaacctaggacttttctattaaaatataatgaaaatggaaccattacagatgctgtagactgtgcacttgaccctctctcagaaacaaagtgtacgttgaaatccttcactgtagaaaaaggaatctatcaaacttctaactttagagtccaaccaacagaatctattgttagatttcctaatattacaaacttgtgcccttttggtgaagtttttaacgccaccagatttgcatctgtttatgcttggaacaggaagagaatcagcaactgtgttgctgattattctgtcctatataattccgcatcattttccacttttaagtgttatggagtgtctcctactaaattaaatgatctctgctttactaatgtctatgcagattcatttgtaattagaggtgatgaagtcagacaaatcgctccagggcaaactggaaagattgctgattataattataaattaccagatgattttacaggctgcgttatagcttggaattctaacaatcttgattctaaggttggtggtaattataattacctgtatagattgtttaggaagtctaatctcaaaccttttgagagagatatttcaactgaaatctatcaggccggtagcacaccttgtaatggtgttgaaggttttaattgttactttcctttacaatcatatggtttccaacccactaatggtgttggttaccaaccatacagagtagtagtactttcttttgaacttctacatgcaccagcaactgtttgtggacctaaaaagtctactaatttggttaaaaacaaatgtgtcaatttcaacttcaatggtttaacaggcacaggtgttcttactgagtctaacaaaaagtttctgcctttccaacaatttggcagagacattgctgacactactgatgctgtccgtgatccacagacacttgagattcttgacattacaccatgttcttttggtggtgtcagtgttataacaccaggaacaaatacttctaaccaggttgctgttctttatcaggatgttaactgcacagaagtccctgttgctattcatgcagatcaacttactcctacttggcgtgtttattctacaggttctaatgtttttcaaacacgtgcaggctgtttaataggggctgaacatgtcaacaactcatatgagtgtgacatacccattggtgcaggtatatgcgctagttatcagactcagactaattctcctcggcgggcacgtagtgtagctagtcaatccatcattgcctacactatgtcacttggtgcagaaaattcagttgcttactctaataactctattgccatacccacaaattttactattagtgttaccacagaaattctaccagtgtctatgaccaagacatcagtagattgtacaatgtacatttgtggtgattcaactgaatgcagcaatcttttgttgcaatatggcagtttttgtacacaattaaaccgtgctttaactggaatagctgttgaacaagacaaaaacacccaagaagtttttgcacaagtcaaacaaatttacaaaacaccaccaattaaagattttggtggttttaatttttcacaaatattaccagatccatcaaaaccaagcaagaggtcatttattgaagatctacttttcaacaaagtgacacttgcagatgctggcttcatcaaacaatatggtgattgccttggtgatattgctgctagagacctcatttgtgcacaaaagtttaacggccttactgttttgccacctttgctcacagatgaaatgattgctcaatacacttctgcactgttagcgggtacaatcacttctggttggacctttggtgcaggtgctgcattacaaataccatttgctatgcaaatggcttataggtttaatggtattggagttacacagaatgttctctatgagaaccaaaaattgattgccaaccaatttaatagtgctattggcaaaattcaagactcactttcttccacagcaagtgcacttggaaaacttcaagatgtggtcaaccaaaatgcacaagctttaaacacgcttgttaaacaacttagctccaattttggtgcaatttcaagtgttttaaatgatatcctttcacgtcttgacaaagttgaggctgaagtgcaaattgataggttgatcacaggcagacttcaaagtttgcagacatatgtgactcaacaattaattagagctgcagaaatcagagcttctgctaatcttgctgctactaaaatgtcagagtgtgtacttggacaatcaaaaagagttgatttttgtggaaagggctatcatcttatgtccttccctcagtcagcacctcatggtgtagtcttcttgcatgtgacttatgtccctgcacaagaaaagaacttcacaactgctcctgccatttgtcatgatggaaaagcacactttcctcgtgaaggtgtctttgtttcaaatggcacacactggtttgtaacacaaaggaatttttatgaaccacaaatcattactacagacaacacatttgtgtctggtaactgtgatgttgtaataggaattgtcaacaacacagtttatgatcctttgcaacctgaattagactcattcaaggaggagttagataaatattttaagaatcatacatcaccagatgttgatttaggtgacatctctggcattaatgcttcagttgtaaacattcaaaaagaaattgaccgcctcaatgaggttgccaagaatttaaatgaatctctcatcgatctccaagaacttggaaagtatgagcagtatataatcatgataactactataattatagtgattatagtaatattgttatcattaattgctgttggactgctcctatactgtaaggccagaagcacaccaatcacactaagcaaggatcaactgagtggtataaataatattgcatttagtaactaaataaaaatagcacctaatcatgttcttacaatggtttactatctgctcatagacaacccatctatcattggattttcttaaaatctgaacttcatcgaaactcttatctataaaccatctcacttacactatttaagtagattcctagtttatagttatataaaacacaattgaatgccagtcgaccttaccatctgtaaaaatgaaaactggggcaaatatgtcacgaaggaatccttgcaaatttgaaattcgaggtcattgcttaaatggtaagaggtgtcattttagtcataattattttgaatggccaccccatgcactgcttgtaagacaaaactttatgttaaacagaatacttaagtctatggataaaagtatagataccttatcagaaataagtggagctgcagagttggacagaacagaagagtatgctcttggtgtagttggagtgctagagagttatataggatcaataaacaatataactaaacaatcagcatgtgttgccatgagcaaactcctcactgaactcaatagtgatgatatcaaaaagctgagggacaatgaagagctaaattcacccaagataagagtgtacaatactgtcatatcatatattgaaagcaacaggaaaaacaataaacaaactatccatctgttaaaaagattgccagcagacgtattgaagaaaaccatcaaaaacacattggatatccataagagcataaccatcaacaacccaaaagaatcaactgttagtgatacaaatgaccatgccaaaaataatgatactacctgacaaatatccttgtagtataacttccatactaataacaagtagatgtagagttactatgtataatcaaaagaacacactatatttcaatcaaaacaacccaaataaccatatgtactcaccgaatcaaacattcaatgaaatccattggacctctcaagaattgattgacacaattcaaaattttctacaacatctaggtattattgaggatatatatacaatatatatattagtgtcataacactcaattctaacactcaccacatcgttacattattaattcaaacaattcaagttgtgggacaaaatggatcccattattaatggaaattctgctaatgtttatctaaccgatagttatttaaaaggtgttatctctttctcagagtgtaatgctttaggaagttacatattcaatggtccttatctcaaaaatgattataccaacttaattagtagacaaaatccattaatagaacacatgaatctaaagaaactaaatataacacagtccttaatatctaagtatcataaaggtgaaataaaattagaagaacctacttattttcagtcattacttatgacatacaagagtatgacctcgtcagaacagattgctaccactaatttacttaaaaagataataagaagagctatagaaataagtgatgtcaaagtctatgctatattgaataaactagggcttaaagaaaaggacaagattaaatccaacaatggacaagatgaagacaactcagttattacgaccataatcaaagatgatatactttcagctgttaaagataatcaatctcatcttaaagcagacaaaaatcactctacaaaacaaaaagacacaatcaaaacaacactcttgaagaaattgatgtgttcaatgcaacatcctccatcatggttaatacattggtttaacttatacacaaaattaaacaacatattaacacagtatcgatcaaatgaggtaaaaaaccatgggtttacattgatagataatcaaactcttagtggatttcaatttattttgaaccaatatggttgtatagtttatcataaggaactcaaaagaattactgtgacaacctataatcaattcttgacatggaaagatattagccttagtagattaaatgtttgtttaattacatggattagtaactgcttgaacacattaaataaaagcttaggcttaagatgcggattcaataatgttatcttgacacaactattcctttatggagattgtatactaaagctatttcacaatgaggggttctacataataaaagaggtagagggatttattatgtctctaattttaaatataacagaagaagatcaattcagaaaacgattttataatagtatgctcaacaacatcacagatgctgctaataaagctcagaaaaatctgctatcaagagtatgtcatacattattagataagacagtgtccgataatataataaatggcagatggataattctattaagtaagttccttaaattaattaagcttgcaggtgacaataaccttaacaatctgagtgaactatattttttgttcagaatatttggacacccaatggtagatgaaagacaagccatggatgctgttaaaattaattgcaatgagaccaaattttacttgttaagcagtctgagtatgttaagaggtgcctttatatatagaattataaaagggtttgtaaataattacaacagatggcctactttaagaaatgctattgttttacccttaagatggttaacttactataaactaaacacttatccttctttgttggaacttacagaaagagatttgattgtgttatcaggactacgtttctatcgtgagtttcggttgcctaaaaaagtggatcttgaaatgattataaatgataaagctatatcacctcctaaaaatttgatatggactagtttccctagaaattacatgccatcacacatacaaaactatatagaacatgaaaaattaaaattttccgagagtgataaatcaagaagagtattagagtattatttaagagataacaaattcaatgaatgtgatttatacaactgtgtagttaatcaaagttatctcaacaaccctaatcatgtggtatcattgacaggcaaagaaagagaactcagtgtaggtagaatgtttgcaatgcaaccgggaatgttcagacaggttcaaatattggcagagaaaatgatagctgaaaacattttacaattctttcctgaaagtcttacaagatatggtgatctagaactacaaaaaatattagaattgaaagcaggaataagtaacaaatcaaatcgctacaatgataattacaacaattacattagtaagtgctctatcatcacagatctcagcaaattcaatcaagcatttcgatatgaaacgtcatgtatttgtagtgatgtgctggatgaactgcatggtgtacaatctctattttcctggttacatttaactattcctcatgtcacaataatatgcacatataggcatgcacccccctatataggagatcatattgtagatcttaacaatgtagatgaacaaagtggattatatagatatcacatgggtggcatcgaagggtggtgtcaaaaactgtggaccatagaagctatatcactattggatctaatatctctcaaagggaaattctcaattactgctttaattaatggtgacaatcaatcaatagatataagcaaaccaatcagactcatggaaggtcaaactcatgctcaagcagattatttgctagcattaaatagccttaaattactgtataaagagtatgcaggcataggccacaaattaaaaggaactgagacttatatatcacgagatatgcaatttatgagtaaaacaattcaacataacggtgtatattacccagctagtataaagaaagtcctaagagtgggaccgtggataaacactatacttgatgatttcaaagtgagtctagaatctataggtagtttgacacaagaattagaatatagaggtgaaagtctattatgcagtttaatatttagaaatgtatggttatataatcagattgctctacaattaaaaaatcatgcattatgtaacaataaactatatttggacatattaaaggttctgaaacacttaaaaaccttttttaatcttgataatattgatacagcattaacattgtatatgaatttacccatgttatttggtggtggtgatcccaacttgttatatcgaagtttctatagaagaactcctgacttcctcacagaggctatagttcactctgtgttcatacttagttattatacaaaccatgacttaaaagataaacttcaagatctgtcagatgatagattgaataagttcttaacatgcataatcacgtttgacaaaaaccctaatgctgaattcgtaacattgatgagagatcctcaagctttagggtctgagagacaagctaaaattactagcgaaatcaatagactggcagttacagaggttttgagtacagctccaaacaaaatattctccaaaagtgcacaacattatactactacagagatagatctaaatgatattatgcaaaatatagaacctacatatcctcatgggctaagagttgtttatgaaagtttacccttttataaagcagagaaaatagtaaatcttatatcaggtacaaaatctataactaacatactggaaaaaacttctgccatagacttaacagatattgatagagccactgagatgatgaggaaaaacataactttgcttataaggatacttccattggattgtaacagagataaaagagagatattgagtatggaaaacctaagtattactgaattaagcaaatatgttagggaaagatcttggtctttatccaatatagttggtgttacatcacccagtatcatgtatacaatggacatcaaatatactacaagcactatatctagtggcataattatagagaaatataatgttaacagtttaacacgtggtgagagaggacccactaaaccatgggttggttcatctacacaagagaaaaaaacaatgccagtttataatagacaagtcttaaccaaaaaacagagagatcaaatagatctattagcaaaattggattgggtgtatgcatctatagataacaaggatgaattcatggaagaactcagcataggaacccttgggttaacatatgaaaaggccaagaaattatttccacaatatttaagtgtcaattatttgcatcgccttacagtcagtagtagaccatgtgaattccctgcatcaataccagcttatagaacaacaaattatcactttgacactagccctattaatcgcatattaacagaaaagtatggtgatgaagatattgacatagtattccaaaactgtataagctttggccttagtttaatgtcagtagtagaacaatttactaatgtatgtcctaacagaattattctcatacctaagcttaatgagatacatttgatgaaacctcccatattcacaggtgatgttgatattcacaagttaaaacaagtgatacaaaaacagcatatgtttttaccagacaaaataagtttgactcaatatgtggaattattcttaagtaataaaacactcaaatctggatctcatgttaattctaatttaatattggcacataaaatatctgactattttcataatacttacattttaagtactaatttagctggacattggattctgattatacaacttatgaaagattctaaaggtatttttgaaaaagattggggagagggatatataactgatcatatgtttattaatttgaaagttttcttcaatgcttataagacctatctcttgtgttttcataaaggttatggcaaagcaaagctggagtgtgatatgaacacttcagatcttctatgtgtattggaattaatagacagtagttattggaagtctatgtctaaggtatttttagaacaaaaagttatcaaatacattcttagccaagatgcaagtttacatagagtaaaaggatgtcatagcttcaaattatggtttcttaaacgtcttaatgtagcagaattcacagtttgcccttgggttgttaacatagattatcatccaacacatatgaaagcaatattaacttatatagatcttgttagaatgggattgataaatatagatagaatacacattaaaaataaacacaaattcaatgatgaattttatacttctaatctcttctacattaattataacttctcagataatactcatctattaactaaacatataaggattgctaattctgaattagaaaataattacaacaaattatatcatcctacaccagaaaccctagagaatatactagccaatccgattaaaagtaatgacaaaaagacactgaatgactattgtataggtaaaaatgttgactcaataatgttaccattgttatctaataagaagcttattaaatcgtctgcaatgattagaaccaattacagcaaacaagatttgtataatttattccctatggttgtgattgatagaattatagatcattcaggcaatacagccaaatccaaccaactttacactactacttcccaccaaatatctttagtgcacaatagcacatcactttactgcatgcttccttggcatcatattaatagattcaattttgtatttagttctacaggttgtaaaattagtatagagtatattttaaaagatcttaaaattaaagatcccaattgtatagcattcataggtgaaggagcagggaatttattattgcgtacagtagtggaacttcatcctgacataagatatatttacagaagtctgaaagattgcaatgatcatagtttacctattgagtttttaaggctgtacaatggacatatcaacattgattatggtgaaaatttgaccattcctgctacagatgcaaccaacaacattcattggtcttatttacatataaagtttgctgaacctatcagtctttttgtctgtgatgccgaattgtctgtaacagtcaactggagtaaaattataatagaatggagcaagcatgtaagaaagtgcaagtactgttcctcagttaataaatgtatgttaatagtaaaatatcatgctcaagatgatattgatttcaaattagacaatataactatattaaaaacttatgtatgcttaggcagtaagttaaagggatcggaggtttacttagtccttacaataggtcctgcgaatatattcccagtatttaatgtagtacaaaatgctaaattgatactatcaagaaccaaaaatttcatcatgcctaagaaagctgataaagagtctattgatgcaaatattaaaagtttgataccctttctttgttaccctataacaaaaaaaggaattaatactgcattgtcaaaactaaagagtgttgttagtggagatatactatcatattctatagctggacgtaatgaagttttcagcaataaacttataaatcataagcatatgaacatcttaaaatggttcaatcatgttttaaatttcagatcaacagaactaaactataaccatttatatatggtagaatctacatatccttacctaagtgaattgttaaacagcttgacaaccaatgaacttaaaaaactgattaaaatcacaggtagtctgttatacaactttcataatgaataatgaataaagatcttataataaaaattcccatagctatacactaacactgtattcaattatagttattaaaaattaaaaatcgtacgattttttaaataacttttagtgaactaatcctaaagttatcattttaatcttggaggaataaatttaaaccctaatctaattggtttatatgtgtattaactaaattacgagatattagtttttgacactttttttctcgt

SEQ ID NO: 114 - DNA, 23362 bp, Artificial Sequence
  Description of Artificial Sequence: Synthetic polynucleotide
aaacggatccttcgaaacgaaattaatacgactcactatagggaagtttttcgcgtctgatgaggccgttaggccgaaactcctctccggagtcacgcgaaaaaatgcgtacaacaaacttgcataaaccaaaaaaatggggcaaataagaatttgataagtaccacttaaatttaactcccttgcttagcgatggtgagcgagctgattaaggagaacatgcacatgaagctgtacatggagggcaccgtgaacaaccaccacttcaagtgcacatccgagggcgaaggcaagccctacgagggcacccagaccatgagaatcaaggcggtcgagggcggccctctccccttcgccttcgacatcctggctaccagcttcatgtacggcagcaaaaccttcatcaaccacacccagggcatccccgacttctttaagcagtccttccccgagggcttcacatgggagagagtcaccacatacgaagacgggggcgtgctgaccgctacccaggacaccagcctccaggacggctgcctcatctacaacgtcaagatcagaggggtgaacttcccatccaacggccctgtgatgcagaagaaaacactcggctgggaggcctccaccgagaccctgtaccccgctgacggcggcctggaaggcagagccgacatggccctgaagctcgtgggcgggggccacctgatctgcaacttgaagaccacatacagatccaagaaacccgctaagaacctcaagatgcccggcgtctactatgtggacagaagactggaaagaatcaaggaggccgacaaagagacctacgtcgagcagcacgaggtggctgtggccagatactgcgacctccctagcaaactggggcacagatgagtattcaattatagttattaaaaacttaacagaagacaaaaatggggcaaataagaatttgataagtaccacttaaatttaactcccttgcttagcgatgggttcgaattcgctatcgatgataaaagtacgtctacaaaatctatttgataatgatgaagtagcgctactaaaaataacgtgttatacggataaactaatacatctaacgaatgcgctagcgaaagcggtaatacatacgataaaactaaatggtatagtatttgtacatgtaataacgtcgtcggatatatgtccgaataataatatagtagtaaaatcgaattttacgacgatgccggtactacaaaatggtggttatatatgggaaatgatggaactaacgcattgttcgcaaccgaatggtctactagatgataattgtgaaataaaattttcgaaaaaactatcggattcgacgatgacgaattatatgaatcaactatcggaactactaggttttgatctaaatccgtaaattataattaatatcaactagcaaatcaatgtcactaacaccattagttaatataaaacttaacagaagacaaaaatggggcaaataaatcaattcagccaacccaaccatggatacgacgcataatgataatacgccgcaacgtctaatgataacggatatgcgtccgctatcgctagaaacgataataacgtcgctaacgcgtgatataataacgcataaatttatatatctaataaatcatgaatgtatagtacgtaaactagatgaacgtcaagcgacgtttacgtttctagtaaattatgaaatgaaactactacataaagtaggttcgacgaaatataaaaaatatacggaatataatacgaaatatggtacgtttccgatgccgatatttataaatcatgatggttttctagaatgtataggtataaaaccgacgaaacatacgccgataatatataaatatgatctaaatccgtaaatttcaacacaatattcacacaatctaaaacaacaactctatgcataactatactccatagtccagatggagcctgaaaattatagtaatttaaaattaaggagagatataagatagaagatggggcaaatacaaagatggctcttagcaaagtcaagttgaatgatacactcaacaaagatcaacttctgtcatccagcaaatacaccatccaacggagcacaggagatagtattgatactcctaattatgatgtgcagaaacacatcaataagttatgtggcatgttattaatcacagaagatgctaatcataaattcactgggttaataggtatgttatatgcgatgtctaggttaggaagagaagacaccataaaaatactcagagatgcgggatatcatgtaaaagcaaatggagtagatgtaacaacacatcgtcaagacattaatggaaaagaaatgaaatttgaagtgttaacattggcaagcttaacaactgaaattcaaatcaacattgagatagaatctagaaaatcctacaaaaaaatgctaaaagaaatgggagaggtagctccagaatacaggcatgactctcctgattgtgggatgataatattatgtatagcagcattagtaataactaaattagcagcaggggacagatctggtcttacagccgtgattaggagagctaataatgtcctaaaaaatgaaatgaaacgttacaaaggcttactacccaaggacatagccaacagcttctatgaagtgtttgaaaaacatccccactttatagatgtttttgttcattttggtatagcacaatcttctaccagaggtggcagtagagttgaagggatttttgcaggattgtttatgaatgcctatggtgcagggcaagtgatgttacggtggggagtcttagcaaaatcagttaaaaatattatgttaggacatgctagtgtgcaagcagaaatggaacaagttgttgaggtttatgaatatgcccaaaaattgggtggtgaagcaggattctaccatatattgaacaacccaaaagcatcattattatctttgactcaatttcctcacttctccagtgtagtattaggcaatgctgctggcctaggcataatgggagagtacagaggtacaccgaggaatcaagatctatatgatgcagcaaaggcatatgctgaacaactcaaagaaaatggtgtgattaactacagtgtactagacttgacagcagaagaactagaggctatcaaacatcagcttaatccaaaagataatgatgtagagctttgagttaataaaaaatggggcaaataaatcatcatggaaaagtttgctcctgaattccatggagaagatgcaaacaacagggctactaaattcctagaatcaataaagggcaaattcacatcacccaaagatcccaagaaaaaagatagtatcatatctgtcaactcaatagatatagaagtaaccaaagaaagccctataacatcaaattcaactattatcaacccaacaaatgagacagatgatactgcagggaacaagcccaattatcaaagaaaacctctagtaagtttcaaagaagaccctacaccaagtgataatcccttttctaaactatacaaagaaaccatagaaacatttgataacaatgaagaagaatccagctattcatacgaagaaataaatgatcagacaaacgataatataacagcaagattagataggattgatgaaaaattaagtgaaatactaggaatgcttcacacattagtagtggcaagtgcaggacctacatctgctcgggatggtataagagatgccatgattggtttaagagaagaaatgatagaaaaaatcagaactgaagcattaatgaccaatgacagattagaagctatggcaagactcaggaatgaggaaagtgaaaagatggcaaaagacacatcagatgaagtgtctctcaatccaacatcagagaaattgaacaacctattggaagggaatgatagtgacaatgatctatcacttgaagatttctgattagttaccactcttcacatcaacacacaataccaacagaagaccaacaaactaaccaacccaatcatccaaccaaacatccatccgccaatcagccaaacagccaacaaaacaaccagccaatccaaaactaaccacccggaaaaaatctataatatagttacaaaaaaaggaaagggtggggcaaatatggaaacatacgtgaacaagcttcacgaaggctccacatacacagctgctgttcaatacaatgtcttagaaaaagacgatgaccctgcatcacttacaatatgggtgcccatgttccaatcatctatgccagcagatttacttataaaagaactagctaatgtcaacatactagtgaaacaaatatccacacccaagggaccttcactaagagtcatgataaactcaagaagtgcagtgctagcacaaatgcccagcaaatttaccatatgcgctaatgtgtccttggatgaaagaagcaaactagcatatgatgtaaccacaccctgtgaaatcaaggcatgtagtctaacatgcctaaaatcaaaaaatatgttgactacagttaaagatctcactatgaagacactcaaccctacacatgatattattgctttatgtgaatttgaaaacatagtaacatcaaaaaaagtcataataccaacatacctaagatccatcagtgtcagaaataaagatctgaacacacttgaaaatataacaaccactgaattcaaaaatgctatcacaaatgcaaaaatcatcccttactcaggattactattagtcatcacagtgactgacaacaaaggagcattcaaatacataaagccacaaagtcaattcatagtagatcttggagcttacctagaaaaagaaagtatatattatgttaccacaaattggaagcacacagctacacgatttgcaatcaaacccatggaagattaacctttttcctctacatcagtgtgttaattcatacaaactttctacctacattcttcacttcaccatcacaatcacaaacactctgtggttcaaccaatcaaacaaaacttatctgaagtcccagatcatcccaagtcattgtttatcagatctagtactcaaataagttaataaaaaatatacacatggacgtccatggggcaaatgcaaacatgtttgtttttcttgttttattgccactagtctctagtcagtgtgttaatcttacaaccagaactcaattaccccctgcatacactaattctttcacacgtggtgtttattaccctgacaaagttttcagatcctcagttttacattcaactcaggacttgttcttacctttcttttccaatgttacttggttccatgctatacatgtctctgggaccaatggtactaagaggtttgataaccctgtcctaccatttaatgatggtgtttattttgcttccactgagaagtctaacataataagaggctggatttttggtactactttagattcgaagacccagtccctacttattgttaataacgctactaatgttgttattaaagtctgtgaatttcaattttgtaatgatccatttttgggtgtttattaccacaaaaacaacaaaagttggatggaaagtgagttcagagtttattctagtgcgaataattgcacttttgaatatgtctctcagccttttcttatggaccttgaaggaaaacagggtaatttcaaaaatcttagggaatttgtgtttaagaatattgatggttattttaaaatatattctaagcacacgcctattaatttagtgcgtgatctccctcagggtttttcggctttagaaccattggtagatttgccaataggtattaacatcactaggtttcaaactttacttgctttacatagaagttatttgactcctggtgattcttcttcaggttggacagctggtgctgcagcttattatgtgggttatcttcaacctaggacttttctattaaaatataatgaaaatggaaccattacagatgctgtagactgtgcacttgaccctctctcagaaacaaagtgtacgttgaaatccttcactgtagaaaaaggaatctatcaaacttctaactttagagtccaaccaacagaatctattgttagatttcctaatattacaaacttgtgcccttttggtgaagtttttaacgccaccagatttgcatctgtttatgcttggaacaggaagagaatcagcaactgtgttgctgattattctgtcctatataattccgcatcattttccacttttaagtgttatggagtgtctcctactaaattaaatgatctctgctttactaatgtctatgcagattcatttgtaattagaggtgatgaagtcagacaaatcgctccagggcaaactggaaagattgctgattataattataaattaccagatgattttacaggctgcgttatagcttggaattctaacaatcttgattctaaggttggtggtaattataattacctgtatagattgtttaggaagtctaatctcaaaccttttgagagagatatttcaactgaaatctatcaggccggtagcacaccttgtaatggtgttgaaggttttaattgttactttcctttacaatcatatggtttccaacccactaatggtgttggttaccaaccatacagagtagtagtactttcttttgaacttctacatgcaccagcaactgtttgtggacctaaaaagtctactaatttggttaaaaacaaatgtgtcaatttcaacttcaatggtttaacaggcacaggtgttcttactgagtctaacaaaaagtttctgcctttccaacaatttggcagagacattgctgacactactgatgctgtccgtgatccacagacacttgagattcttgacattacaccatgttcttttggtggtgtcagtgttataacaccaggaacaaatacttctaaccaggttgctgttctttatcaggatgttaactgcacagaagtccctgttgctattcatgcagatcaacttactcctacttggcgtgtttattctacaggttctaatgtttttcaaacacgtgcaggctgtttaataggggctgaacatgtcaacaactcatatgagtgtgacatacccattggtgcaggtatatgcgctagttatcagactcagactaattctcctcggcgggcacgtagtgtagctagtcaatccatcattgcctacactatgtcacttggtgcagaaaattcagttgcttactctaataactctattgccatacccacaaattttactattagtgttaccacagaaattctaccagtgtctatgaccaagacatcagtagattgtacaatgtacatttgtggtgattcaactgaatgcagcaatcttttgttgcaatatggcagtttttgtacacaattaaaccgtgctttaactggaatagctgttgaacaagacaaaaacacccaagaagtttttgcacaagtcaaacaaatttacaaaacaccaccaattaaagattttggtggttttaatttttcacaaatattaccagatccatcaaaaccaagcaagaggtcatttattgaagatctacttttcaacaaagtgacacttgcagatgctggcttcatcaaacaatatggtgattgccttggtgatattgctgctagagacctcatttgtgcacaaaagtttaacggccttactgttttgccacctttgctcacagatgaaatgattgctcaatacacttctgcactgttagcgggtacaatcacttctggttggacctttggtgcaggtgctgcattacaaataccatttgctatgcaaatggcttataggtttaatggtattggagttacacagaatgttctctatgagaaccaaaaattgattgccaaccaatttaatagtgctattggcaaaattcaagactcactttcttccacagcaagtgcacttggaaaacttcaagatgtggtcaaccaaaatgcacaagctttaaacacgcttgttaaacaacttagctccaattttggtgcaatttcaagtgttttaaatgatatcctttcacgtcttgacaaagttgaggctgaagtgcaaattgataggttgatcacaggcagacttcaaagtttgcagacatatgtgactcaacaattaattagagctgcagaaatcagagcttctgctaatcttgctgctactaaaatgtcagagtgtgtacttggacaatcaaaaagagttgatttttgtggaaagggctatcatcttatgtccttccctcagtcagcacctcatggtgtagtcttcttgcatgtgacttatgtccctgcacaagaaaagaacttcacaactgctcctgccatttgtcatgatggaaaagcacactttcctcgtgaaggtgtctttgtttcaaatggcacacactggtttgtaacacaaaggaatttttatgaaccacaaatcattactacagacaacacatttgtgtctggtaactgtgatgttgtaataggaattgtcaacaacacagtttatgatcctttgcaacctgaattagactcattcaaggaggagttagataaatattttaagaatcatacatcaccagatgttgatttaggtgacatctctggcattaatgcttcagttgtaaacattcaaaaagaaattgaccgcctcaatgaggttgccaagaatttaaatgaatctctcatcgatctccaagaacttggaaagtatgagcagtatataatcatgataactactataattatagtgattatagtaatattgttatcattaattgctgttggactgctcctatactgtaaggccagaagcacaccaatcacactaagcaaggatcaactgagtggtataaataatattgcatttagtaactaaataaaaatagcacctaatcatgttcttacaatggtttactatctgctcatagacaacccatctatcattggattttcttaaaatctgaacttcatcgaaactcttatctataaaccatctcacttacactatttaagtagattcctagtttatagttatataaaacacaattgaatgccagtcgaccttaccatctgtaaaaatgaaaactggggcaaatatgtcacgaaggaatccttgcaaatttgaaattcgaggtcattgcttaaatggtaagaggtgtcattttagtcataattattttgaatggccaccccatgcactgcttgtaagacaaaactttatgttaaacagaatacttaagtctatggataaaagtatagataccttatcagaaataagtggagctgcagagttggacagaacagaagagtatgctcttggtgtagttggagtgctagagagttatataggatcaataaacaatataactaaacaatcagcatgtgttgccatgagcaaactcctcactgaactcaatagtgatgatatcaaaaagctgagggacaatgaagagctaaattcacccaagataagagtgtacaatactgtcatatcatatattgaaagcaacaggaaaaacaataaacaaactatccatctgttaaaaagattgccagcagacgtattgaagaaaaccatcaaaaacacattggatatccataagagcataaccatcaacaacccaaaagaatcaactgttagtgatacaaatgaccatgccaaaaataatgatactacctgacaaatatccttgtagtataacttccatactaataacaagtagatgtagagttactatgtataatcaaaagaacacactatatttcaatcaaaacaacccaaataaccatatgtactcaccgaatcaaacattcaatgaaatccattggacctctcaagaattgattgacacaattcaaaattttctacaacatctaggtattattgaggatatatatacaatatatatattagtgtcataacactcaattctaacactcaccacatcgttacattattaattcaaacaattcaagttgtgggacaaaatggatcccattattaatggaaattctgctaatgtttatctaaccgatagttatttaaaaggtgttatctctttctcagagtgtaatgctttaggaagttacatattcaatggtccttatctcaaaaatgattataccaacttaattagtagacaaaatccattaatagaacacatgaatctaaagaaactaaatataacacagtccttaatatctaagtatcataaaggtgaaataaaattagaagaacctacttattttcagtcattacttatgacatacaagagtatgacctcgtcagaacagattgctaccactaatttacttaaaaagataataagaagagctatagaaataagtgatgtcaaagtctatgctatattgaataaactagggcttaaagaaaaggacaagattaaatccaacaatggacaagatgaagacaactcagttattacgaccataatcaaagatgatatactttcagctgttaaagataatcaatctcatcttaaagcagacaaaaatcactctacaaaacaaaaagacacaatcaaaacaacactcttgaagaaattgatgtgttcaatgcaacatcctccatcatggttaatacattggtttaacttatacacaaaattaaacaacatattaacacagtatcgatcaaatgaggtaaaaaaccatgggtttacattgatagataatcaaactcttagtggatttcaatttattttgaaccaatatggttgtatagtttatcataaggaactcaaaagaattactgtgacaacctataatcaattcttgacatggaaagatattagccttagtagattaaatgtttgtttaattacatggattagtaactgcttgaacacattaaataaaagcttaggcttaagatgcggattcaataatgttatcttgacacaactattcctttatggagattgtatactaaagctatttcacaatgaggggttctacataataaaagaggtagagggatttattatgtctctaattttaaatataacagaagaagatcaattcagaaaacgattttataatagtatgctcaacaacatcacagatgctgctaataaagctcagaaaaatctgctatcaagagtatgtcatacattattagataagacagtgtccgataatataataaatggcagatggataattctattaagtaagttccttaaattaattaagcttgcaggtgacaataaccttaacaatctgagtgaactatattttttgttcagaatatttggacacccaatggtagatgaaagacaagccatggatgctgttaaaattaattgcaatgagaccaaattttacttgttaagcagtctgagtatgttaagaggtgcctttatatatagaattataaaagggtttgtaaataattacaacagatggcctactttaagaaatgctattgttttacccttaagatggttaacttactataaactaaacacttatccttctttgttggaacttacagaaagagatttgattgtgttatcaggactacgtttctatcgtgagtttcggttgcctaaaaaagtggatcttgaaatgattataaatgataaagctatatcacctcctaaaaatttgatatggactagtttccctagaaattacatgccatcacacatacaaaactatatagaacatgaaaaattaaaattttccgagagtgataaatcaagaagagtattagagtattatttaagagataacaaattcaatgaatgtgatttatacaactgtgtagttaatcaaagttatctcaacaaccctaatcatgtggtatcattgacaggcaaagaaagagaactcagtgtaggtagaatgtttgcaatgcaaccgggaatgttcagacaggttcaaatattggcagagaaaatgatagctgaaaacattttacaattctttcctgaaagtcttacaagatatggtgatctagaactacaaaaaatattagaattgaaagcaggaataagtaacaaatcaaatcgctacaatgataattacaacaattacattagtaagtgctctatcatcacagatctcagcaaattcaatcaagcatttcgatatgaaacgtcatgtatttgtagtgatgtgctggatgaactgcatggtgtacaatctctattttcctggttacatttaactattcctcatgtcacaataatatgcacatataggcatgcacccccctatataggagatcatattgtagatcttaacaatgtagatgaacaaagtggattatatagatatcacatgggtggcatcgaagggtggtgtcaaaaactgtggaccatagaagctatatcactattggatctaatatctctcaaagggaaattctcaattactgctttaattaatggtgacaatcaatcaatagatataagcaaaccaatcagactcatggaaggtcaaactcatgctcaagcagattatttgctagcattaaatagccttaaattactgtataaagagtatgcaggcataggccacaaattaaaaggaactgagacttatatatcacgagatatgcaatttatgagtaaaacaattcaacataacggtgtatattacccagctagtataaagaaagtcctaagagtgggaccgtggataaacactatacttgatgatttcaaagtgagtctagaatctataggtagtttgacacaagaattagaatatagaggtgaaagtctattatgcagtttaatatttagaaatgtatggttatataatcagattgctctacaattaaaaaatcatgcattatgtaacaataaactatatttggacatattaaaggttctgaaacacttaaaaaccttttttaatcttgataatattgatacagcattaacattgtatatgaatttacccatgttatttggtggtggtgatcccaacttgttatatcgaagtttctatagaagaactcctgacttcctcacagaggctatagttcactctgtgttcatacttagttattatacaaaccatgacttaaaagataaacttcaagatctgtcagatgatagattgaataagttcttaacatgcataatcacgtttgacaaaaaccctaatgctgaattcgtaacattgatgagagatcctcaagctttagggtctgagagacaagctaaaattactagcgaaatcaatagactggcagttacagaggttttgagtacagctccaaacaaaatattctccaaaagtgcacaacattatactactacagagatagatctaaatgatattatgcaaaatatagaacctacatatcctcatgggctaagagttgtttatgaaagtttacccttttataaagcagagaaaatagtaaatcttatatcaggtacaaaatctataactaacatactggaaaaaacttctgccatagacttaacagatattgatagagccactgagatgatgaggaaaaacataactttgcttataaggatacttccattggattgtaacagagataaaagagagatattgagtatggaaaacctaagtattactgaattaagcaaatatgttagggaaagatcttggtctttatccaatatagttggtgttacatcacccagtatcatgtatacaatggacatcaaatatactacaagcactatatctagtggcataattatagagaaatataatgttaacagtttaacacgtggtgagagaggacccactaaaccatgggttggttcatctacacaagagaaaaaaacaatgccagtttataatagacaagtcttaaccaaaaaacagagagatcaaatagatctattagcaaaattggattgggtgtatgcatctatagataacaaggatgaattcatggaagaactcagcataggaacccttgggttaacatatgaaaaggccaagaaattatttccacaatatttaagtgtcaattatttgcatcgccttacagtcagtagtagaccatgtgaattccctgcatcaataccagcttatagaacaacaaattatcactttgacactagccctattaatcgcatattaacagaaaagtatggtgatgaagatattgacatagtattccaaaactgtataagctttggccttagtttaatgtcagtagtagaacaatttactaatgtatgtcctaacagaattattctcatacctaagcttaatgagatacatttgatgaaacctcccatattcacaggtgatgttgatattcacaagttaaaacaagtgatacaaaaacagcatatgtttttaccagacaaaataagtttgactcaatatgtggaattattcttaagtaataaaacactcaaatctggatctcatgttaattctaatttaatattggcacataaaatatctgactattttcataatacttacattttaagtactaatttagctggacattggattctgattatacaacttatgaaagattctaaaggtatttttgaaaaagattggggagagggatatataactgatcatatgtttattaatttgaaagttttcttcaatgcttataagacctatctcttgtgttttcataaaggttatggcaaagcaaagctggagtgtgatatgaacacttcagatcttctatgtgtattggaattaatagacagtagttattggaagtctatgtctaaggtatttttagaacaaaaagttatcaaatacattcttagccaagatgcaagtttacatagagtaaaaggatgtcatagcttcaaattatggtttcttaaacgtcttaatgtagcagaattcacagtttgcccttgggttgttaacatagattatcatccaacacatatgaaagcaatattaacttatatagatcttgttagaatgggattgataaatatagatagaatacacattaaaaataaacacaaattcaatgatgaattttatacttctaatctcttctacattaattataacttctcagataatactcatctattaactaaacatataaggattgctaattctgaattagaaaataattacaacaaattatatcatcctacaccagaaaccctagagaatatactagccaatccgattaaaagtaatgacaaaaagacactgaatgactattgtataggtaaaaatgttgactcaataatgttaccattgttatctaataagaagcttattaaatcgtctgcaatgattagaaccaattacagcaaacaagatttgtataatttattccctatggttgtgattgatagaattatagatcattcaggcaatacagccaaatccaaccaactttacactactacttcccaccaaatatctttagtgcacaatagcacatcactttactgcatgcttccttggcatcatattaatagattcaattttgtatttagttctacaggttgtaaaattagtatagagtatattttaaaagatcttaaaattaaagatcccaattgtatagcattcataggtgaaggagcagggaatttattattgcgtacagtagtggaacttcatcctgacataagatatatttacagaagtctgaaagattgcaatgatcatagtttacctattgagtttttaaggctgtacaatggacatatcaacattgattatggtgaaaatttgaccattcctgctacagatgcaaccaacaacattcattggtcttatttacatataaagtttgctgaacctatcagtctttttgtctgtgatgccgaattgtctgtaacagtcaactggagtaaaattataatagaatggagcaagcatgtaagaaagtgcaagtactgttcctcagttaataaatgtatgttaatagtaaaatatcatgctcaagatgatattgatttcaaattagacaatataactatattaaaaacttatgtatgcttaggcagtaagttaaagggatcggaggtttacttagtccttacaataggtcctgcgaatatattcccagtatttaatgtagtacaaaatgctaaattgatactatcaagaaccaaaaatttcatcatgcctaagaaagctgataaagagtctattgatgcaaatattaaaagtttgataccctttctttgttaccctataacaaaaaaaggaattaatactgcattgtcaaaactaaagagtgttgttagtggagatatactatcatattctatagctggacgtaatgaagttttcagcaataaacttataaatcataagcatatgaacatcttaaaatggttcaatcatgttttaaatttcagatcaacagaactaaactataaccatttatatatggtagaatctacatatccttacctaagtgaattgttaaacagcttgacaaccaatgaacttaaaaaactgattaaaatcacaggtagtctgttatacaactttcataatgaataatgaataaagatcttataataaaaattcccatagctatacactaacactgtattcaattatagttattaaaaattaaaaatcgtacgattttttaaataacttttagtgaactaatcctaaagttatcattttaatcttggaggaataaatttaaaccctaatctaattggtttatatgtgtattaactaaattacgagatattagtttttgacactttttttctcgtgggtcggcatggcatctccacctcctcgcggtccgacctgggcatccgaaggaggacgcacgtccactcggatggctaagggagctgctaacaaagcccgaaaggaagctgagttggctgctgccaccgctgagcaataactagcataaccccttggggcctctaaacgggtcttgaggggttttttgctgaaaggaggaactatatacgcgtaagcttctcgacccattctcatgtttgacagcttatcatcgaatttctgccattcatccgcttattatcacttattcaggcgtagcaaccaggcgtttaagggcaccaataactgccttaaaaaaattacgccccgccctgccactcatcgcagtactgttgtaattcattaagcattctgccgacatggaagccatcacagacggcatgatgaacctgaatcgccagcggcatcagcaccttgtcgccttgcgtataatatttgcccatggtgaaaacgggggcgaagaagttgtccatattggccacgtttaaatcaaaactggtgaaactcacccagggattggctgagacgaaaaacatattctcaataaaccctttagggaaataggccaggttttcaccgtaacacgccacatcttgcgaatatatgtgtagaaactgccggaaatcgtcgtggtattcactccagagcgatgaaaacgtttcagtttgctcatggaaaacggtgtaacaagggtgaacactatcccatatcaccagctcaccgtctttcattgccatacggaattccggatgagcattcatcaggcgggcaagaatgtgaataaaggccggataaaacttgtgcttatttttctttacggtctttaaaaaggccgtaatatccagctgaacggtctggttataggtacattgagcaactgactgaaatgcctcaaaatgttctttacgatgccattgggatatatcaacggtggtatatccagtgatttttttctccattttagcttccttagctcctgaaaatctcgataactcaaaaaatacgcccggtagtgatcttatttcattatggtgaaagttggaacctcttacgtgccgatcaacgtctcattttcgccaaaagttggcccagggcttcccggtatcaacagggacaccaggatttatttattctgcgaagtgatcttccgtcacaggtatttattcgcgataagctcatggagcggcgtaaccgtcgcacaggaaggacagagaaagcgcggatctgggaagtgacggacagaacggtcaggacctggattggggaggcggttgccgccgctgctgctgacggtgtgacgttctctgttccggtcacaccacatacgttccgccattcctatgcgatgcacatgctgtatgccggtataccgctgaaagttctgcaaagcctgatgggacataagtccatcagttcaacggaagtctacacgaaggtttttgcgctggatgtggctgcccggcaccgggtgcagtttgcgatgccggagtctgatgcggttgcgatgctgaaacaattatcctgagaataaatgccttggcctttatatggaaatgtggaactgagtggatatgctgtttttgtctgttaaacagagaagctggctgttatccactgagaagcgaacgaaacagtcgggaaaatctcccattatcgtagagatccgcattattaatctcaggagcctgtgtagcgtttataggaagtagtgttctgtcatgatgcctgcaagcggtaacgaaaacgatttgaatatgccttcaggaacaatagaaatcttcgtgcggtgttacgttgaagtggagcggattatgtcagcaatggacagaacaacctaatgaacacagaaccatgatgtggtctgtccttttacagccagtaggctcgccgcagtcgagcgacggcgaagccctcgagtgagcgaggaagcaccagggaacagcacttatatattctgcttacacacgatgcctgaaaaaacttcccttggggttatccacttatccacggggatatttttataattattttttttatagtttttagatcttcttttttagagcgccttgtaggcctttatccatgctggttctagagaaggtgttgtgacaaattgccctttcagtgtgacaaatcaccctcaaatgacagtcctgtctgtgacaaattgcccttaaccctgtgacaaattgccctcagaagaagctgttttttcacaaagttatccctgcttattgactcttttttatttagtgtgacaatctaaaaacttgtcacacttcacatggatctgtcatggcggaaacagcggttatcaatcacaagaaacgtaaaaatagcccgcgaatcgtccagtcaaacgacctcactgaggcggcatatagtctctcccgggatcaaaaacgtatgctgtatctgttcgttgaccagatcagaaaatctgatggcaccctacaggaacatgacggtatctgcgagatccatgttgctaaatatgctgaaatattcggattgacctctgcggaagccagtaaggatatacggcaggcattgaagagtttcgcggggaaggaagtggttttttatcgccctgaagaggatgccggcgatgaaaaaggctatgaatcttttccttggtttatcaaacgtgcgcacagtccatccagagggctttacagtgtacatatcaacccatatctcattcccttctttatcgggttacagaaccggtttacgcagtttcggcttagtgaaacaaaagaaatcaccaatccgtatgccatgcgtttatacgaatccctgtgtcagtatcgtaagccggatggctcaggcatcgtctctctgaaaatcgactggatcatagagcgttaccagctgcctcaaagttaccagcgtatgcctgacttccgccgccgcttcctgcaggtctgtgttaatgagatcaacagcagaactccaatgcgcctctcatacattgagaaaaagaaaggccgccagacgactcatatcgtattttccttccgcgatatcacttccatgacgacaggatagtctgagggttatctgtcacagatttgagggtggttcgtcacatttgttctgacctactgagggtaatttgtcacagttttgctgtttccttcagcctgcatggattttctcatactttttgaactgtaatttttaaggaagccaaatttgagggcagtttgtcacagttgatttccttctctttcccttcgtcatgtgacctgatatcgggggttagttcgtcatcattgatgagggttgattatcacagtttattactctgaattggctatccgcgtgtgtacctctacctggagtttttcccacggtggatatttcttcttgcgctgagcgtaagagctatctgacagaacagttcttctttgcttcctcgccagttcgctcgctatgctcggttacacggctgcggcgagcgctagtgataataagtgactgaggtatgtgctcttcttatctccttttgtagtgttgctcttattttaaacaactttgcggttttttgatgactttgcgattttgttgttgctttgcagtaaattgcaagatttaataaaaaaacgcaaagcaatgattaaaggatgttcagaatgaaactcatggaaacacttaaccagtgcataaacgctggtcatgaaatgacgaaggctatcgccattgcacagtttaatgatgacagcccggaagcgaggaaaataacccggcgctggagaataggtgaagcagcggatttagttggggtttcttctcaggctatcagagatgccgagaaagcagggcgactaccgcacccggatatggaaattcgaggacgggttgagcaacgtgttggttatacaattgaacaaattaatcatatgcgtgatgtgtttggtacgcgattgcgacgtgctgaagacgtatttccaccggtgatcggggttgctgcccataaaggtggcgtttacaaaacctcagtttctgttcatcttgctcaggatctggctctgaaggggctacgtgttttgctcgtggaaggtaacgacccccagggaacagcctcaatgtatcacggatgggtaccagatcttcatattcatgcagaagacactctcctgcctttctatcttggggaaaaggacgatgtcacttatgcaataaagcccacttgctggccggggcttgacattattccttcctgtctggctctgcaccgtattgaaactgagttaatgggcaaatttgatgaaggtaaactgcccaccgatccacacctgatgctccgactggccattgaaactgttgctcatgactatgatgtcatagttattgacagcgcgcctaacctgggtatcggcacgattaatgtcgtatgtgctgctgatgtgctgattgttcccacgcctgctgagttgtttgactacacctccgcactgcagtttttcgatatgcttcgtgatctgctcaagaacgttgatcttaaagggttcgagcctgatgtacgtattttgcttaccaaatacagcaatagtaatggctctcagtccccgtggatggaggagcaaattcgggatgcctggggaagcatggttctaaaaaatgttgtacgtgaaacggatgaagttggtaaaggtcagatccggatgagaactgtttttgaacaggccattgatcaacgctcttcaactggtgcctggagaaatgctctttctatttgggaacctgtctgcaatgaaattttcgatcgtctgattaaaccacgctgggagattagataatgaagcgtgcgcctgttattccaaaacatacgctcaatactcaaccggttgaagatacttcgttatcgacaccagctgccccgatggtggattcgttaattgcgcgcgtaggagtaatggctcgcggtaatgccattactttgcctgtatgtggtcgggatgtgaagtttactcttgaagtgctccggggtgatagtgttgagaagacctctcgggtatggtcaggtaatgaacgtgaccaggagctgcttactgaggacgcactggatgatctcatcccttcttttctactgactggtcaacagacaccggcgttcggtcgaagagtatctggtgtcatagaaattgccgatgggagtcgccgtcgtaaagctgctgcacttaccgaaagtgattatcgtgttctggttggcgagctggatgatgagcagatggctgcattatccagattgggtaacgattatcgcccaacaagtgcttatgaacgtggtcagcgttatgcaagccgattgcagaatgaatttgctggaaatatttctgcgctggctgatgcggaaaatatttcacgtaagattattacccgctgtatcaacaccgccaaattgcctaaatcagttgttgctcttttttctcaccccggtgaactatctgcccggtcaggtgatgcacttcaaaaagcctttacagataaagaggaattacttaagcagcaggcatctaaccttcatgagcagaaaaaagctggggtgatatttgaagctgaagaagttatcactcttttaacttctgtgcttaaaacgtcatctgcatcaagaactagtttaagctcacgacatcagtttgctcctggagcgacagtattgtataagggcgataaaatggtgcttaacctggacaggtctcgtgttccaactgagtgtatagagaaaattgaggccattcttaaggaacttgaaaagccagcaccctgatgcgaccacgttttagtctacgtttatctgtctttacttaatgtcctttgttacaggccagaaagcataactggcctgaatattctctctgggcccactgttccacttgtatcgtcggtctgataatcagactgggaccacggtcccactcgtatcgtcggtctgattattagtctgggaccacggtcccactcgtatcgtcggtctgattattagtctgggaccacggtcccactcgtatcgtcggtctgataatcagactgggaccacggtcccactcgtatcgtcggtctgattattagtctgggaccatggtcccactcgtatcgtcggtctgattattagtctgggaccacggtcccactcgtatcgtcggtctgattattagtctggaaccacggtcccactcgtatcgtcggtctgattattagtctgggaccacggtcccactcgtatcgtcggtctgattattagtctgggaccacgatcccactcgtgttgtcggtctgattatcggtctgggaccacggtcccacttgtattgtcgatcagactatcagcgtgagactacgattccatcaatgcctgtcaagggcaagtattgacatgtcgtcgtaacctgtagaacggagtaacctcggtgtgcggttgtatgcctgctgtggattgctgctgtgtcctgcttatccacaacattttgcgcacggttatgtggacaaaatacctggttacccaggccgtgccggcacgttaaccgggctgcatccgatgcaagtgtgtcgctgtcgagttt

SEQ ID NO: 115 - DNA, 22566 bp, Artificial Sequence
  Description of Artificial Sequence: Synthetic polynucleotide
aaacggatccttcgaaacgaaattaatacgactcactatagggaagtttttcgcgtctgatgaggccgttaggccgaaactcctctccggagtcacgcgaaaaaatgcgtacaacaaacttgcataaaccaaaaaaatggggcaaataagaatttgataagtaccacttaaatttaactcccttgcttagcgatgggttcgaattcgctatcgatgataaaagtacgtctacaaaatctatttgataatgatgaagtagcgctactaaaaataacgtgttatacggataaactaatacatctaacgaatgcgctagcgaaagcggtaatacatacgataaaactaaatggtatagtatttgtacatgtaataacgtcgtcggatatatgtccgaataataatatagtagtaaaatcgaattttacgacgatgccggtactacaaaatggtggttatatatgggaaatgatggaactaacgcattgttcgcaaccgaatggtctactagatgataattgtgaaataaaattttcgaaaaaactatcggattcgacgatgacgaattatatgaatcaactatcggaactactaggttttgatctaaatccgtaaattataattaatatcaactagcaaatcaatgtcactaacaccattagttaatataaaacttaacagaagacaaaaatggggcaaataaatcaattcagccaacccaaccatggatacgacgcataatgataatacgccgcaacgtctaatgataacggatatgcgtccgctatcgctagaaacgataataacgtcgctaacgcgtgatataataacgcataaatttatatatctaataaatcatgaatgtatagtacgtaaactagatgaacgtcaagcgacgtttacgtttctagtaaattatgaaatgaaactactacataaagtaggttcgacgaaatataaaaaatatacggaatataatacgaaatatggtacgtttccgatgccgatatttataaatcatgatggttttctagaatgtataggtataaaaccgacgaaacatacgccgataatatataaatatgatctaaatccgtaaatttcaacacaatattcacacaatctaaaacaacaactctatgcataactatactccatagtccagatggagcctgaaaattatagtaatttaaaattaaggagagatataagatagaagatggggcaaatacaaagatggctcttagcaaagtcaagttgaatgatacactcaacaaagatcaacttctgtcatccagcaaatacaccatccaacggagcacaggagatagtattgatactcctaattatgatgtgcagaaacacatcaataagttatgtggcatgttattaatcacagaagatgctaatcataaattcactgggttaataggtatgttatatgcgatgtctaggttaggaagagaagacaccataaaaatactcagagatgcgggatatcatgtaaaagcaaatggagtagatgtaacaacacatcgtcaagacattaatggaaaagaaatgaaatttgaagtgttaacattggcaagcttaacaactgaaattcaaatcaacattgagatagaatctagaaaatcctacaaaaaaatgctaaaagaaatgggagaggtagctccagaatacaggcatgactctcctgattgtgggatgataatattatgtatagcagcattagtaataactaaattagcagcaggggacagatctggtcttacagccgtgattaggagagctaataatgtcctaaaaaatgaaatgaaacgttacaaaggcttactacccaaggacatagccaacagcttctatgaagtgtttgaaaaacatccccactttatagatgtttttgttcattttggtatagcacaatcttctaccagaggtggcagtagagttgaagggatttttgcaggattgtttatgaatgcctatggtgcagggcaagtgatgttacggtggggagtcttagcaaaatcagttaaaaatattatgttaggacatgctagtgtgcaagcagaaatggaacaagttgttgaggtttatgaatatgcccaaaaattgggtggtgaagcaggattctaccatatattgaacaacccaaaagcatcattattatctttgactcaatttcctcacttctccagtgtagtattaggcaatgctgctggcctaggcataatgggagagtacagaggtacaccgaggaatcaagatctatatgatgcagcaaaggcatatgctgaacaactcaaagaaaatggtgtgattaactacagtgtactagacttgacagcagaagaactagaggctatcaaacatcagcttaatccaaaagataatgatgtagagctttgagttaataaaaaatggggcaaataaatcatcatggaaaagtttgctcctgaattccatggagaagatgcaaacaacagggctactaaattcctagaatcaataaagggcaaattcacatcacccaaagatcccaagaaaaaagatagtatcatatctgtcaactcaatagatatagaagtaaccaaagaaagccctataacatcaaattcaactattatcaacccaacaaatgagacagatgatactgcagggaacaagcccaattatcaaagaaaacctctagtaagtttcaaagaagaccctacaccaagtgataatcccttttctaaactatacaaagaaaccatagaaacatttgataacaatgaagaagaatccagctattcatacgaagaaataaatgatcagacaaacgataatataacagcaagattagataggattgatgaaaaattaagtgaaatactaggaatgcttcacacattagtagtggcaagtgcaggacctacatctgctcgggatggtataagagatgccatgattggtttaagagaagaaatgatagaaaaaatcagaactgaagcattaatgaccaatgacagattagaagctatggcaagactcaggaatgaggaaagtgaaaagatggcaaaagacacatcagatgaagtgtctctcaatccaacatcagagaaattgaacaacctattggaagggaatgatagtgacaatgatctatcacttgaagatttctgattagttaccactcttcacatcaacacacaataccaacagaagaccaacaaactaaccaacccaatcatccaaccaaacatccatccgccaatcagccaaacagccaacaaaacaaccagccaatccaaaactaaccacccggaaaaaatctataatatagttacaaaaaaaggaaagggtggggcaaatatggaaacatacgtgaacaagcttcacgaaggctccacatacacagctgctgttcaatacaatgtcttagaaaaagacgatgaccctgcatcacttacaatatgggtgcccatgttccaatcatctatgccagcagatttacttataaaagaactagctaatgtcaacatactagtgaaacaaatatccacacccaagggaccttcactaagagtcatgataaactcaagaagtgcagtgctagcacaaatgcccagcaaatttaccatatgcgctaatgtgtccttggatgaaagaagcaaactagcatatgatgtaaccacaccctgtgaaatcaaggcatgtagtctaacatgcctaaaatcaaaaaatatgttgactacagttaaagatctcactatgaagacactcaaccctacacatgatattattgctttatgtgaatttgaaaacatagtaacatcaaaaaaagtcataataccaacatacctaagatccatcagtgtcagaaataaagatctgaacacacttgaaaatataacaaccactgaattcaaaaatgctatcacaaatgcaaaaatcatcccttactcaggattactattagtcatcacagtgactgacaacaaaggagcattcaaatacataaagccacaaagtcaattcatagtagatcttggagcttacctagaaaaagaaagtatatattatgttaccacaaattggaagcacacagctacacgatttgcaatcaaacccatggaagattaacctttttcctctacatcagtgtgttaattcatacaaactttctacctacattcttcacttcaccatcacaatcacaaacactctgtggttcaaccaatcaaacaaaacttatctgaagtcccagatcatcccaagtcattgtttatcagatctagtactcaaataagttaataaaaaatatacacatggacgtccatggggcaaatgcaaacatgtttgtttttcttgttttattgccactagtctctagtcagtgtgttaatcttacaaccagaactcaattaccccctgcatacactaattctttcacacgtggtgtttattaccctgacaaagttttcagatcctcagttttacattcaactcaggacttgttcttacctttcttttccaatgttacttggttccatgctatacatgtctctgggaccaatggtactaagaggtttgataaccctgtcctaccatttaatgatggtgtttattttgcttccactgagaagtctaacataataagaggctggatttttggtactactttagattcgaagacccagtccctacttattgttaataacgctactaatgttgttattaaagtctgtgaatttcaattttgtaatgatccatttttgggtgtttattaccacaaaaacaacaaaagttggatggaaagtgagttcagagtttattctagtgcgaataattgcacttttgaatatgtctctcagccttttcttatggaccttgaaggaaaacagggtaatttcaaaaatcttagggaatttgtgtttaagaatattgatggttattttaaaatatattctaagcacacgcctattaatttagtgcgtgatctccctcagggtttttcggctttagaaccattggtagatttgccaataggtattaacatcactaggtttcaaactttacttgctttacatagaagttatttgactcctggtgattcttcttcaggttggacagctggtgctgcagcttattatgtgggttatcttcaacctaggacttttctattaaaatataatgaaaatggaaccattacagatgctgtagactgtgcacttgaccctctctcagaaacaaagtgtacgttgaaatccttcactgtagaaaaaggaatctatcaaacttctaactttagagtccaaccaacagaatctattgttagatttcctaatattacaaacttgtgcccttttggtgaagtttttaacgccaccagatttgcatctgtttatgcttggaacaggaagagaatcagcaactgtgttgctgattattctgtcctatataattccgcatcattttccacttttaagtgttatggagtgtctcctactaaattaaatgatctctgctttactaatgtctatgcagattcatttgtaattagaggtgatgaagtcagacaaatcgctccagggcaaactggaaagattgctgattataattataaattaccagatgattttacaggctgcgttatagcttggaattctaacaatcttgattctaaggttggtggtaattataattacctgtatagattgtttaggaagtctaatctcaaaccttttgagagagatatttcaactgaaatctatcaggccggtagcacaccttgtaatggtgttgaaggttttaattgttactttcctttacaatcatatggtttccaacccactaatggtgttggttaccaaccatacagagtagtagtactttcttttgaacttctacatgcaccagcaactgtttgtggacctaaaaagtctactaatttggttaaaaacaaatgtgtcaatttcaacttcaatggtttaacaggcacaggtgttcttactgagtctaacaaaaagtttctgcctttccaacaatttggcagagacattgctgacactactgatgctgtccgtgatccacagacacttgagattcttgacattacaccatgttcttttggtggtgtcagtgttataacaccaggaacaaatacttctaaccaggttgctgttctttatcaggatgttaactgcacagaagtccctgttgctattcatgcagatcaacttactcctacttggcgtgtttattctacaggttctaatgtttttcaaacacgtgcaggctgtttaataggggctgaacatgtcaacaactcatatgagtgtgacatacccattggtgcaggtatatgcgctagttatcagactcagactaattctcctcggcgggcacgtagtgtagctagtcaatccatcattgcctacactatgtcacttggtgcagaaaattcagttgcttactctaataactctattgccatacccacaaattttactattagtgttaccacagaaattctaccagtgtctatgaccaagacatcagtagattgtacaatgtacatttgtggtgattcaactgaatgcagcaatcttttgttgcaatatggcagtttttgtacacaattaaaccgtgctttaactggaatagctgttgaacaagacaaaaacacccaagaagtttttgcacaagtcaaacaaatttacaaaacaccaccaattaaagattttggtggttttaatttttcacaaatattaccagatccatcaaaaccaagcaagaggtcatttattgaagatctacttttcaacaaagtgacacttgcagatgctggcttcatcaaacaatatggtgattgccttggtgatattgctgctagagacctcatttgtgcacaaaagtttaacggccttactgttttgccacctttgctcacagatgaaatgattgctcaatacacttctgcactgttagcgggtacaatcacttctggttggacctttggtgcaggtgctgcattacaaataccatttgctatgcaaatggcttataggtttaatggtattggagttacacagaatgttctctatgagaaccaaaaattgattgccaaccaatttaatagtgctattggcaaaattcaagactcactttcttccacagcaagtgcacttggaaaacttcaagatgtggtcaaccaaaatgcacaagctttaaacacgcttgttaaacaacttagctccaattttggtgcaatttcaagtgttttaaatgatatcctttcacgtcttgacaaagttgaggctgaagtgcaaattgataggttgatcacaggcagacttcaaagtttgcagacatatgtgactcaacaattaattagagctgcagaaatcagagcttctgctaatcttgctgctactaaaatgtcagagtgtgtacttggacaatcaaaaagagttgatttttgtggaaagggctatcatcttatgtccttccctcagtcagcacctcatggtgtagtcttcttgcatgtgacttatgtccctgcacaagaaaagaacttcacaactgctcctgccatttgtcatgatggaaaagcacactttcctcgtgaaggtgtctttgtttcaaatggcacacactggtttgtaacacaaaggaatttttatgaaccacaaatcattactacagacaacacatttgtgtctggtaactgtgatgttgtaataggaattgtcaacaacacagtttatgatcctttgcaacctgaattagactcattcaaggaggagttagataaatattttaagaatcatacatcaccagatgttgatttaggtgacatctctggcattaatgcttcagttgtaaacattcaaaaagaaattgaccgcctcaatgaggttgccaagaatttaaatgaatctctcatcgatctccaagaacttggaaagtatgagcagtatataatcatgataactactataattatagtgattatagtaatattgttatcattaattgctgttggactgctcctatactgtaaggccagaagcacaccaatcacactaagcaaggatcaactgagtggtataaataatattgcatttagtaactaaataaaaatagcacctaatcatgttcttacaatggtttactatctgctcatagacaacccatctatcattggattttcttaaaatctgaacttcatcgaaactcttatctataaaccatctcacttacactatttaagtagattcctagtttatagttatataaaacacaattgaatgccagtcgaccttaccatctgtaaaaatgaaaactggggcaaatatgtcacgaaggaatccttgcaaatttgaaattcgaggtcattgcttaaatggtaagaggtgtcattttagtcataattattttgaatggccaccccatgcactgcttgtaagacaaaactttatgttaaacagaatacttaagtctatggataaaagtatagataccttatcagaaataagtggagctgcagagttggacagaacagaagagtatgctcttggtgtagttggagtgctagagagttatataggatcaataaacaatataactaaacaatcagcatgtgttgccatgagcaaactcctcactgaactcaatagtgatgatatcaaaaagctgagggacaatgaagagctaaattcacccaagataagagtgtacaatactgtcatatcatatattgaaagcaacaggaaaaacaataaacaaactatccatctgttaaaaagattgccagcagacgtattgaagaaaaccatcaaaaacacattggatatccataagagcataaccatcaacaacccaaaagaatcaactgttagtgatacaaatgaccatgccaaaaataatgatactacctgacaaatatccttgtagtataacttccatactaataacaagtagatgtagagttactatgtataatcaaaagaacacactatatttcaatcaaaacaacccaaataaccatatgtactcaccgaatcaaacattcaatgaaatccattggacctctcaagaattgattgacacaattcaaaattttctacaacatctaggtattattgaggatatatatacaatatatatattagtgtcataacactcaattctaacactcaccacatcgttacattattaattcaaacaattcaagttgtgggacaaaatggatcccattattaatggaaattctgctaatgtttatctaaccgatagttatttaaaaggtgttatctctttctcagagtgtaatgctttaggaagttacatattcaatggtccttatctcaaaaatgattataccaacttaattagtagacaaaatccattaatagaacacatgaatctaaagaaactaaatataacacagtccttaatatctaagtatcataaaggtgaaataaaattagaagaacctacttattttcagtcattacttatgacatacaagagtatgacctcgtcagaacagattgctaccactaatttacttaaaaagataataagaagagctatagaaataagtgatgtcaaagtctatgctatattgaataaactagggcttaaagaaaaggacaagattaaatccaacaatggacaagatgaagacaactcagttattacgaccataatcaaagatgatatactttcagctgttaaagataatcaatctcatcttaaagcagacaaaaatcactctacaaaacaaaaagacacaatcaaaacaacactcttgaagaaattgatgtgttcaatgcaacatcctccatcatggttaatacattggtttaacttatacacaaaattaaacaacatattaacacagtatcgatcaaatgaggtaaaaaaccatgggtttacattgatagataatcaaactcttagtggatttcaatttattttgaaccaatatggttgtatagtttatcataaggaactcaaaagaattactgtgacaacctataatcaattcttgacatggaaagatattagccttagtagattaaatgtttgtttaattacatggattagtaactgcttgaacacattaaataaaagcttaggcttaagatgcggattcaataatgttatcttgacacaactattcctttatggagattgtatactaaagctatttcacaatgaggggttctacataataaaagaggtagagggatttattatgtctctaattttaaatataacagaagaagatcaattcagaaaacgattttataatagtatgctcaacaacatcacagatgctgctaataaagctcagaaaaatctgctatcaagagtatgtcatacattattagataagacagtgtccgataatataataaatggcagatggataattctattaagtaagttccttaaattaattaagcttgcaggtgacaataaccttaacaatctgagtgaactatattttttgttcagaatatttggacacccaatggtagatgaaagacaagccatggatgctgttaaaattaattgcaatgagaccaaattttacttgttaagcagtctgagtatgttaagaggtgcctttatatatagaattataaaagggtttgtaaataattacaacagatggcctactttaagaaatgctattgttttacccttaagatggttaacttactataaactaaacacttatccttctttgttggaacttacagaaagagatttgattgtgttatcaggactacgtttctatcgtgagtttcggttgcctaaaaaagtggatcttgaaatgattataaatgataaagctatatcacctcctaaaaatttgatatggactagtttccctagaaattacatgccatcacacatacaaaactatatagaacatgaaaaattaaaattttccgagagtgataaatcaagaagagtattagagtattatttaagagataacaaattcaatgaatgtgatttatacaactgtgtagttaatcaaagttatctcaacaaccctaatcatgtggtatcattgacaggcaaagaaagagaactcagtgtaggtagaatgtttgcaatgcaaccgggaatgttcagacaggttcaaatattggcagagaaaatgatagctgaaaacattttacaattctttcctgaaagtcttacaagatatggtgatctagaactacaaaaaatattagaattgaaagcaggaataagtaacaaatcaaatcgctacaatgataattacaacaattacattagtaagtgctctatcatcacagatctcagcaaattcaatcaagcatttcgatatgaaacgtcatgtatttgtagtgatgtgctggatgaactgcatggtgtacaatctctattttcctggttacatttaactattcctcatgtcacaataatatgcacatataggcatgcacccccctatataggagatcatattgtagatcttaacaatgtagatgaacaaagtggattatatagatatcacatgggtggcatcgaagggtggtgtcaaaaactgtggaccatagaagctatatcactattggatctaatatctctcaaagggaaattctcaattactgctttaattaatggtgacaatcaatcaatagatataagcaaaccaatcagactcatggaaggtcaaactcatgctcaagcagattatttgctagcattaaatagccttaaattactgtataaagagtatgcaggcataggccacaaattaaaaggaactgagacttatatatcacgagatatgcaatttatgagtaaaacaattcaacataacggtgtatattacccagctagtataaagaaagtcctaagagtgggaccgtggataaacactatacttgatgatttcaaagtgagtctagaatctataggtagtttgacacaagaattagaatatagaggtgaaagtctattatgcagtttaatatttagaaatgtatggttatataatcagattgctctacaattaaaaaatcatgcattatgtaacaataaactatatttggacatattaaaggttctgaaacacttaaaaaccttttttaatcttgataatattgatacagcattaacattgtatatgaatttacccatgttatttggtggtggtgatcccaacttgttatatcgaagtttctatagaagaactcctgacttcctcacagaggctatagttcactctgtgttcatacttagttattatacaaaccatgacttaaaagataaacttcaagatctgtcagatgatagattgaataagttcttaacatgcataatcacgtttgacaaaaaccctaatgctgaattcgtaacattgatgagagatcctcaagctttagggtctgagagacaagctaaaattactagcgaaatcaatagactggcagttacagaggttttgagtacagctccaaacaaaatattctccaaaagtgcacaacattatactactacagagatagatctaaatgatattatgcaaaatatagaacctacatatcctcatgggctaagagttgtttatgaaagtttacccttttataaagcagagaaaatagtaaatcttatatcaggtacaaaatctataactaacatactggaaaaaacttctgccatagacttaacagatattgatagagccactgagatgatgaggaaaaacataactttgcttataaggatacttccattggattgtaacagagataaaagagagatattgagtatggaaaacctaagtattactgaattaagcaaatatgttagggaaagatcttggtctttatccaatatagttggtgttacatcacccagtatcatgtatacaatggacatcaaatatactacaagcactatatctagtggcataattatagagaaatataatgttaacagtttaacacgtggtgagagaggacccactaaaccatgggttggttcatctacacaagagaaaaaaacaatgccagtttataatagacaagtcttaaccaaaaaacagagagatcaaatagatctattagcaaaattggattgggtgtatgcatctatagataacaaggatgaattcatggaagaactcagcataggaacccttgggttaacatatgaaaaggccaagaaattatttccacaatatttaagtgtcaattatttgcatcgccttacagtcagtagtagaccatgtgaattccctgcatcaataccagcttatagaacaacaaattatcactttgacactagccctattaatcgcatattaacagaaaagtatggtgatgaagatattgacatagtattccaaaactgtataagctttggccttagtttaatgtcagtagtagaacaatttactaatgtatgtcctaacagaattattctcatacctaagcttaatgagatacatttgatgaaacctcccatattcacaggtgatgttgatattcacaagttaaaacaagtgatacaaaaacagcatatgtttttaccagacaaaataagtttgactcaatatgtggaattattcttaagtaataaaacactcaaatctggatctcatgttaattctaatttaatattggcacataaaatatctgactattttcataatacttacattttaagtactaatttagctggacattggattctgattatacaacttatgaaagattctaaaggtatttttgaaaaagattggggagagggatatataactgatcatatgtttattaatttgaaagttttcttcaatgcttataagacctatctcttgtgttttcataaaggttatggcaaagcaaagctggagtgtgatatgaacacttcagatcttctatgtgtattggaattaatagacagtagttattggaagtctatgtctaaggtatttttagaacaaaaagttatcaaatacattcttagccaagatgcaagtttacatagagtaaaaggatgtcatagcttcaaattatggtttcttaaacgtcttaatgtagcagaattcacagtttgcccttgggttgttaacatagattatcatccaacacatatgaaagcaatattaacttatatagatcttgttagaatgggattgataaatatagatagaatacacattaaaaataaacacaaattcaatgatgaattttatacttctaatctcttctacattaattataacttctcagataatactcatctattaactaaacatataaggattgctaattctgaattagaaaataattacaacaaattatatcatcctacaccagaaaccctagagaatatactagccaatccgattaaaagtaatgacaaaaagacactgaatgactattgtataggtaaaaatgttgactcaataatgttaccattgttatctaataagaagcttattaaatcgtctgcaatgattagaaccaattacagcaaacaagatttgtataatttattccctatggttgtgattgatagaattatagatcattcaggcaatacagccaaatccaaccaactttacactactacttcccaccaaatatctttagtgcacaatagcacatcactttactgcatgcttccttggcatcatattaatagattcaattttgtatttagttctacaggttgtaaaattagtatagagtatattttaaaagatcttaaaattaaagatcccaattgtatagcattcataggtgaaggagcagggaatttattattgcgtacagtagtggaacttcatcctgacataagatatatttacagaagtctgaaagattgcaatgatcatagtttacctattgagtttttaaggctgtacaatggacatatcaacattgattatggtgaaaatttgaccattcctgctacagatgcaaccaacaacattcattggtcttatttacatataaagtttgctgaacctatcagtctttttgtctgtgatgccgaattgtctgtaacagtcaactggagtaaaattataatagaatggagcaagcatgtaagaaagtgcaagtactgttcctcagttaataaatgtatgttaatagtaaaatatcatgctcaagatgatattgatttcaaattagacaatataactatattaaaaacttatgtatgcttaggcagtaagttaaagggatcggaggtttacttagtccttacaataggtcctgcgaatatattcccagtatttaatgtagtacaaaatgctaaattgatactatcaagaaccaaaaatttcatcatgcctaagaaagctgataaagagtctattgatgcaaatattaaaagtttgataccctttctttgttaccctataacaaaaaaaggaattaatactgcattgtcaaaactaaagagtgttgttagtggagatatactatcatattctatagctggacgtaatgaagttttcagcaataaacttataaatcataagcatatgaacatcttaaaatggttcaatcatgttttaaatttcagatcaacagaactaaactataaccatttatatatggtagaatctacatatccttacctaagtgaattgttaaacagcttgacaaccaatgaacttaaaaaactgattaaaatcacaggtagtctgttatacaactttcataatgaataatgaataaagatcttataataaaaattcccatagctatacactaacactgtattcaattatagttattaaaaattaaaaatcgtacgattttttaaataacttttagtgaactaatcctaaagttatcattttaatcttggaggaataaatttaaaccctaatctaattggtttatatgtgtattaactaaattacgagatattagtttttgacactttttttctcgtgggtcggcatggcatctccacctcctcgcggtccgacctgggcatccgaaggaggacgcacgtccactcggatggctaagggagctgctaacaaagcccgaaaggaagctgagttggctgctgccaccgctgagcaataactagcataaccccttggggcctctaaacgggtcttgaggggttttttgctgaaaggaggaactatatacgcgtaagcttctcgacccattctcatgtttgacagcttatcatcgaatttctgccattcatccgcttattatcacttattcaggcgtagcaaccaggcgtttaagggcaccaataactgccttaaaaaaattacgccccgccctgccactcatcgcagtactgttgtaattcattaagcattctgccgacatggaagccatcacagacggcatgatgaacctgaatcgccagcggcatcagcaccttgtcgccttgcgtataatatttgcccatggtgaaaacgggggcgaagaagttgtccatattggccacgtttaaatcaaaactggtgaaactcacccagggattggctgagacgaaaaacatattctcaataaaccctttagggaaataggccaggttttcaccgtaacacgccacatcttgcgaatatatgtgtagaaactgccggaaatcgtcgtggtattcactccagagcgatgaaaacgtttcagtttgctcatggaaaacggtgtaacaagggtgaacactatcccatatcaccagctcaccgtctttcattgccatacggaattccggatgagcattcatcaggcgggcaagaatgtgaataaaggccggataaaacttgtgcttatttttctttacggtctttaaaaaggccgtaatatccagctgaacggtctggttataggtacattgagcaactgactgaaatgcctcaaaatgttctttacgatgccattgggatatatcaacggtggtatatccagtgatttttttctccattttagcttccttagctcctgaaaatctcgataactcaaaaaatacgcccggtagtgatcttatttcattatggtgaaagttggaacctcttacgtgccgatcaacgtctcattttcgccaaaagttggcccagggcttcccggtatcaacagggacaccaggatttatttattctgcgaagtgatcttccgtcacaggtatttattcgcgataagctcatggagcggcgtaaccgtcgcacaggaaggacagagaaagcgcggatctgggaagtgacggacagaacggtcaggacctggattggggaggcggttgccgccgctgctgctgacggtgtgacgttctctgttccggtcacaccacatacgttccgccattcctatgcgatgcacatgctgtatgccggtataccgctgaaagttctgcaaagcctgatgggacataagtccatcagttcaacggaagtctacacgaaggtttttgcgctggatgtggctgcccggcaccgggtgcagtttgcgatgccggagtctgatgcggttgcgatgctgaaacaattatcctgagaataaatgccttggcctttatatggaaatgtggaactgagtggatatgctgtttttgtctgttaaacagagaagctggctgttatccactgagaagcgaacgaaacagtcgggaaaatctcccattatcgtagagatccgcattattaatctcaggagcctgtgtagcgtttataggaagtagtgttctgtcatgatgcctgcaagcggtaacgaaaacgatttgaatatgccttcaggaacaatagaaatcttcgtgcggtgttacgttgaagtggagcggattatgtcagcaatggacagaacaacctaatgaacacagaaccatgatgtggtctgtccttttacagccagtaggctcgccgcagtcgagcgacggcgaagccctcgagtgagcgaggaagcaccagggaacagcacttatatattctgcttacacacgatgcctgaaaaaacttcccttggggttatccacttatccacggggatatttttataattattttttttatagtttttagatcttcttttttagagcgccttgtaggcctttatccatgctggttctagagaaggtgttgtgacaaattgccctttcagtgtgacaaatcaccctcaaatgacagtcctgtctgtgacaaattgcccttaaccctgtgacaaattgccctcagaagaagctgttttttcacaaagttatccctgcttattgactcttttttatttagtgtgacaatctaaaaacttgtcacacttcacatggatctgtcatggcggaaacagcggttatcaatcacaagaaacgtaaaaatagcccgcgaatcgtccagtcaaacgacctcactgaggcggcatatagtctctcccgggatcaaaaacgtatgctgtatctgttcgttgaccagatcagaaaatctgatggcaccctacaggaacatgacggtatctgcgagatccatgttgctaaatatgctgaaatattcggattgacctctgcggaagccagtaaggatatacggcaggcattgaagagtttcgcggggaaggaagtggttttttatcgccctgaagaggatgccggcgatgaaaaaggctatgaatcttttccttggtttatcaaacgtgcgcacagtccatccagagggctttacagtgtacatatcaacccatatctcattcccttctttatcgggttacagaaccggtttacgcagtttcggcttagtgaaacaaaagaaatcaccaatccgtatgccatgcgtttatacgaatccctgtgtcagtatcgtaagccggatggctcaggcatcgtctctctgaaaatcgactggatcatagagcgttaccagctgcctcaaagttaccagcgtatgcctgacttccgccgccgcttcctgcaggtctgtgttaatgagatcaacagcagaactccaatgcgcctctcatacattgagaaaaagaaaggccgccagacgactcatatcgtattttccttccgcgatatcacttccatgacgacaggatagtctgagggttatctgtcacagatttgagggtggttcgtcacatttgttctgacctactgagggtaatttgtcacagttttgctgtttccttcagcctgcatggattttctcatactttttgaactgtaatttttaaggaagccaaatttgagggcagtttgtcacagttgatttccttctctttcccttcgtcatgtgacctgatatcgggggttagttcgtcatcattgatgagggttgattatcacagtttattactctgaattggctatccgcgtgtgtacctctacctggagtttttcccacggtggatatttcttcttgcgctgagcgtaagagctatctgacagaacagttcttctttgcttcctcgccagttcgctcgctatgctcggttacacggctgcggcgagcgctagtgataataagtgactgaggtatgtgctcttcttatctccttttgtagtgttgctcttattttaaacaactttgcggttttttgatgactttgcgattttgttgttgctttgcagtaaattgcaagatttaataaaaaaacgcaaagcaatgattaaaggatgttcagaatgaaactcatggaaacacttaaccagtgcataaacgctggtcatgaaatgacgaaggctatcgccattgcacagtttaatgatgacagcccggaagcgaggaaaataacccggcgctggagaataggtgaagcagcggatttagttggggtttcttctcaggctatcagagatgccgagaaagcagggcgactaccgcacccggatatggaaattcgaggacgggttgagcaacgtgttggttatacaattgaacaaattaatcatatgcgtgatgtgtttggtacgcgattgcgacgtgctgaagacgtatttccaccggtgatcggggttgctgcccataaaggtggcgtttacaaaacctcagtttctgttcatcttgctcaggatctggctctgaaggggctacgtgttttgctcgtggaaggtaacgacccccagggaacagcctcaatgtatcacggatgggtaccagatcttcatattcatgcagaagacactctcctgcctttctatcttggggaaaaggacgatgtcacttatgcaataaagcccacttgctggccggggcttgacattattccttcctgtctggctctgcaccgtattgaaactgagttaatgggcaaatttgatgaaggtaaactgcccaccgatccacacctgatgctccgactggccattgaaactgttgctcatgactatgatgtcatagttattgacagcgcgcctaacctgggtatcggcacgattaatgtcgtatgtgctgctgatgtgctgattgttcccacgcctgctgagttgtttgactacacctccgcactgcagtttttcgatatgcttcgtgatctgctcaagaacgttgatcttaaagggttcgagcctgatgtacgtattttgcttaccaaatacagcaatagtaatggctctcagtccccgtggatggaggagcaaattcgggatgcctggggaagcatggttctaaaaaatgttgtacgtgaaacggatgaagttggtaaaggtcagatccggatgagaactgtttttgaacaggccattgatcaacgctcttcaactggtgcctggagaaatgctctttctatttgggaacctgtctgcaatgaaattttcgatcgtctgattaaaccacgctgggagattagataatgaagcgtgcgcctgttattccaaaacatacgctcaatactcaaccggttgaagatacttcgttatcgacaccagctgccccgatggtggattcgttaattgcgcgcgtaggagtaatggctcgcggtaatgccattactttgcctgtatgtggtcgggatgtgaagtttactcttgaagtgctccggggtgatagtgttgagaagacctctcgggtatggtcaggtaatgaacgtgaccaggagctgcttactgaggacgcactggatgatctcatcccttcttttctactgactggtcaacagacaccggcgttcggtcgaagagtatctggtgtcatagaaattgccgatgggagtcgccgtcgtaaagctgctgcacttaccgaaagtgattatcgtgttctggttggcgagctggatgatgagcagatggctgcattatccagattgggtaacgattatcgcccaacaagtgcttatgaacgtggtcagcgttatgcaagccgattgcagaatgaatttgctggaaatatttctgcgctggctgatgcggaaaatatttcacgtaagattattacccgctgtatcaacaccgccaaattgcctaaatcagttgttgctcttttttctcaccccggtgaactatctgcccggtcaggtgatgcacttcaaaaagcctttacagataaagaggaattacttaagcagcaggcatctaaccttcatgagcagaaaaaagctggggtgatatttgaagctgaagaagttatcactcttttaacttctgtgcttaaaacgtcatctgcatcaagaactagtttaagctcacgacatcagtttgctcctggagcgacagtattgtataagggcgataaaatggtgcttaacctggacaggtctcgtgttccaactgagtgtatagagaaaattgaggccattcttaaggaacttgaaaagccagcaccctgatgcgaccacgttttagtctacgtttatctgtctttacttaatgtcctttgttacaggccagaaagcataactggcctgaatattctctctgggcccactgttccacttgtatcgtcggtctgataatcagactgggaccacggtcccactcgtatcgtcggtctgattattagtctgggaccacggtcccactcgtatcgtcggtctgattattagtctgggaccacggtcccactcgtatcgtcggtctgataatcagactgggaccacggtcccactcgtatcgtcggtctgattattagtctgggaccatggtcccactcgtatcgtcggtctgattattagtctgggaccacggtcccactcgtatcgtcggtctgattattagtctggaaccacggtcccactcgtatcgtcggtctgattattagtctgggaccacggtcccactcgtatcgtcggtctgattattagtctgggaccacgatcccactcgtgttgtcggtctgattatcggtctgggaccacggtcccacttgtattgtcgatcagactatcagcgtgagactacgattccatcaatgcctgtcaagggcaagtattgacatgtcgtcgtaacctgtagaacggagtaacctcggtgtgcggttgtatgcctgctgtggattgctgctgtgtcctgcttatccacaacattttgcgcacggttatgtggacaaaatacctggttacccaggccgtgccggcacgttaaccgggctgcatccgatgcaagtgtgtcgctgtcgagttt

SEQ ID NO: 116 - protein, 10 aa, Artificial Sequence
  Description of Artificial Sequence: Synthetic peptide
  MOD_RES (1)..(1): N or K
  MOD_RES (3)..(3): S or N
  MOD_RES (4)..(4): L, T, M or C
  MOD_RES (5)..(5): Q or R
  MOD_RES (7)..(7): R, N or T
XGXXXCXICI

SEQ ID NO: 117 - protein, 10 aa, Artificial Sequence
  Description of Artificial Sequence: Synthetic peptide
  MOD_RES (4)..(4): L, C or M
  MOD_RES (5)..(5): Q or R
  MOD_RES (7)..(7): R or N
NGSXXCXICI

SEQ ID NO: 118 - protein, 10 aa, Artificial Sequence
  Description of Artificial Sequence: Synthetic peptide
  MOD_RES (1)..(1): K, N or R
  MOD_RES (4)..(4): I or M
  MOD_RES (7)..(7): N, T or Q
XGNXRCXICI

SEQ ID NO: 119 - protein, 20 aa, Mammalian orthorubulavirus 5
KLLTIVVANRNRMENFVYHK

SEQ ID NO: 120 - protein, 19 aa, Mammalian orthorubulavirus 5
MVAEDAPVRATCRVLFRTT

SEQ ID NO: 121 - protein, 35 aa, Measles morbillivirus
CCRGRCNKKGEQVGMSRPGLKPDLTGTSKSYVRSL

SEQ ID NO: 122 - protein, 34 aa, Measles morbillivirus
MSPQRDRINAFYKDNPHPKGSRIVINREHLMIDR

SEQ ID NO: 123 - protein, 30 aa, Mumps orthorubulavirus
YVATKEIRRINFKTNHINTISSSVDDLIRY

SEQ ID NO: 124 - protein, 34 aa, Mumps orthorubulavirus
MEPSKLFIMSDNATVAPGPVVNAAGKKTFRTCFR

SEQ ID NO: 125 - protein, 29 aa, Indiana vesiculovirus
RVGIHLCIKLKHTKKRQIYTDIEMNRLGK

SEQ ID NO: 126 - protein, 43 aa, Rabies lyssavirus
MTAGAMIGLVLIFSLMTWCRRANRPESKQRSFGGTGRNVSVTS

SEQ ID NO: 127 - DNA, 30 bp, Artificial Sequence
  Description of Artificial Sequence: Synthetic primer
cgatcttgtagatctgttcctcaaacgaac

SEQ ID NO: 128 - DNA, 24 bp, Artificial Sequence
  Description of Artificial Sequence: Synthetic primer
atattgcagcagtacgcacacaca

SEQ ID NO: 129 - DNA, 26 bp, Artificial Sequence
  Description of Artificial Sequence: Synthetic probe
acactagccatccttactgcgcttcg

SEQ ID NO: 130 - protein, 82 aa, Human orthopneumovirus
SQVNEKINQSLAFIRKSDELLHNVNAGKSTTNIMITTIIIVIIVILLSLIAVGLLLYCKARSTPVTLSKDQLSGINNIAFSN

SEQ ID NO: 131 - DNA, 22620 bp, Artificial Sequence
  Description of Artificial Sequence: Synthetic polynucleotide
aaacggatccttcgaaacgaaattaatacgactcactatagggaagtttttcgcgtctgatgaggccgttaggccgaaactcctctccggagtcacgcgaaaaaatgcgtacaacaaacttgcataaaccaaaaaaatggggcaaataagaatttgataagtaccacttaaatttaactcccttgcttagcgatgggttcgaattcgctatcgatgataaaagtacgtctacaaaatctatttgataatgatgaagtagcgctactaaaaataacgtgttatacggataaactaatacatctaacgaatgcgctagcgaaagcggtaatacatacgataaaactaaatggtatagtatttgtacatgtaataacgtcgtcggatatatgtccgaataataatatagtagtaaaatcgaattttacgacgatgccggtactacaaaatggtggttatatatgggaaatgatggaactaacgcattgttcgcaaccgaatggtctactagatgataattgtgaaataaaattttcgaaaaaactatcggattcgacgatgacgaattatatgaatcaactatcggaactactaggttttgatctaaatccgtaaattataattaatatcaactagcaaatcaatgtcactaacaccattagttaatataaaacttaacagaagacaaaaatggggcaaataaatcaattcagccaacccaaccatggatacgacgcataatgataatacgccgcaacgtctaatgataacggatatgcgtccgctatcgctagaaacgataataacgtcgctaacgcgtgatataataacgcataaatttatatatctaataaatcatgaatgtatagtacgtaaactagatgaacgtcaagcgacgtttacgtttctagtaaattatgaaatgaaactactacataaagtaggttcgacgaaatataaaaaatatacggaatataatacgaaatatggtacgtttccgatgccgatatttataaatcatgatggttttctagaatgtataggtataaaaccgacgaaacatacgccgataatatataaatatgatctaaatccgtaaatttcaacacaatattcacacaatctaaaacaacaactctatgcataactatactccatagtccagatggagcctgaaaattatagtaatttaaaattaaggagagatataagatagaagatggggcaaatacaaagatggctcttagcaaagtcaagttgaatgatacactcaacaaagatcaacttctgtcatccagcaaatacaccatccaacggagcacaggagatagtattgatactcctaattatgatgtgcagaaacacatcaataagttatgtggcatgttattaatcacagaagatgctaatcataaattcactgggttaataggtatgttatatgcgatgtctaggttaggaagagaagacaccataaaaatactcagagatgcgggatatcatgtaaaagcaaatggagtagatgtaacaacacatcgtcaagacattaatggaaaagaaatgaaatttgaagtgttaacattggcaagcttaacaactgaaattcaaatcaacattgagatagaatctagaaaatcctacaaaaaaatgctaaaagaaatgggagaggtagctccagaatacaggcatgactctcctgattgtgggatgataatattatgtatagcagcattagtaataactaaattagcagcaggggacagatctggtcttacagccgtgattaggagagctaataatgtcctaaaaaatgaaatgaaacgttacaaaggcttactacccaaggacatagccaacagcttctatgaagtgtttgaaaaacatccccactttatagatgtttttgttcattttggtatagcacaatcttctaccagaggtggcagtagagttgaagggatttttgcaggattgtttatgaatgcctatggtgcagggcaagtgatgttacggtggggagtcttagcaaaatcagttaaaaatattatgttaggacatgctagtgtgcaagcagaaatggaacaagttgttgaggtttatgaatatgcccaaaaattgggtggtgaagcaggattctaccatatattgaacaacccaaaagcatcattattatctttgactcaatttcctcacttctccagtgtagtattaggcaatgctgctggcctaggcataatgggagagtacagaggtacaccgaggaatcaagatctatatgatgcagcaaaggcatatgctgaacaactcaaagaaaatggtgtgattaactacagtgtactagacttgacagcagaagaactagaggctatcaaacatcagcttaatccaaaagataatgatgtagagctttgagttaataaaaaatggggcaaataaatcatcatggaaaagtttgctcctgaattccatggagaagatgcaaacaacagggctactaaattcctagaatcaataaagggcaaattcacatcacccaaagatcccaagaaaaaagatagtatcatatctgtcaactcaatagatatagaagtaaccaaagaaagccctataacatcaaattcaactattatcaacccaacaaatgagacagatgatactgcagggaacaagcccaattatcaaagaaaacctctagtaagtttcaaagaagaccctacaccaagtgataatcccttttctaaactatacaaagaaaccatagaaacatttgataacaatgaagaagaatccagctattcatacgaagaaataaatgatcagacaaacgataatataacagcaagattagataggattgatgaaaaattaagtgaaatactaggaatgcttcacacattagtagtggcaagtgcaggacctacatctgctcgggatggtataagagatgccatgattggtttaagagaagaaatgatagaaaaaatcagaactgaagcattaatgaccaatgacagattagaagctatggcaagactcaggaatgaggaaagtgaaaagatggcaaaagacacatcagatgaagtgtctctcaatccaacatcagagaaattgaacaacctattggaagggaatgatagtgacaatgatctatcacttgaagatttctgattagttaccactcttcacatcaacacacaataccaacagaagaccaacaaactaaccaacccaatcatccaaccaaacatccatccgccaatcagccaaacagccaacaaaacaaccagccaatccaaaactaaccacccggaaaaaatctataatatagttacaaaaaaaggaaagggtggggcaaatatggaaacatacgtgaacaagcttcacgaaggctccacatacacagctgctgttcaatacaatgtcttagaaaaagacgatgaccctgcatcacttacaatatgggtgcccatgttccaatcatctatgccagcagatttacttataaaagaactagctaatgtcaacatactagtgaaacaaatatccacacccaagggaccttcactaagagtcatgataaactcaagaagtgcagtgctagcacaaatgcccagcaaatttaccatatgcgctaatgtgtccttggatgaaagaagcaaactagcatatgatgtaaccacaccctgtgaaatcaaggcatgtagtctaacatgcctaaaatcaaaaaatatgttgactacagttaaagatctcactatgaagacactcaaccctacacatgatattattgctttatgtgaatttgaaaacatagtaacatcaaaaaaagtcataataccaacatacctaagatccatcagtgtcagaaataaagatctgaacacacttgaaaatataacaaccactgaattcaaaaatgctatcacaaatgcaaaaatcatcccttactcaggattactattagtcatcacagtgactgacaacaaaggagcattcaaatacataaagccacaaagtcaattcatagtagatcttggagcttacctagaaaaagaaagtatatattatgttaccacaaattggaagcacacagctacacgatttgcaatcaaacccatggaagattaacctttttcctctacatcagtgtgttaattcatacaaactttctacctacattcttcacttcaccatcacaatcacaaacactctgtggttcaaccaatcaaacaaaacttatctgaagtcccagatcatcccaagtcattgtttatcagatctagtactcaaataagttaataaaaaatatacacatggacgtccatggggcaaatgcaaacatgtttgtttttcttgttttattgccactagtctctagtcagtgtgttaatcttacaaccagaactcaattaccccctgcatacactaattctttcacacgtggtgtttattaccctgacaaagttttcagatcctcagttttacattcaactcaggacttgttcttacctttcttttccaatgttacttggttccatgctatacatgtctctgggaccaatggtactaagaggtttgataaccctgtcctaccatttaatgatggtgtttattttgcttccactgagaagtctaacataataagaggctggatttttggtactactttagattcgaagacccagtccctacttattgttaataacgctactaatgttgttattaaagtctgtgaatttcaattttgtaatgatccatttttgggtgtttattaccacaaaaacaacaaaagttggatggaaagtgagttcagagtttattctagtgcgaataattgcacttttgaatatgtctctcagccttttcttatggaccttgaaggaaaacagggtaatttcaaaaatcttagggaatttgtgtttaagaatattgatggttattttaaaatatattctaagcacacgcctattaatttagtgcgtgatctccctcagggtttttcggctttagaaccattggtagatttgccaataggtattaacatcactaggtttcaaactttacttgctttacatagaagttatttgactcctggtgattcttcttcaggttggacagctggtgctgcagcttattatgtgggttatcttcaacctaggacttttctattaaaatataatgaaaatggaaccattacagatgctgtagactgtgcacttgaccctctctcagaaacaaagtgtacgttgaaatccttcactgtagaaaaaggaatctatcaaacttctaactttagagtccaaccaacagaatctattgttagatttcctaatattacaaacttgtgcccttttggtgaagtttttaacgccaccagatttgcatctgtttatgcttggaacaggaagagaatcagcaactgtgttgctgattattctgtcctatataattccgcatcattttccacttttaagtgttatggagtgtctcctactaaattaaatgatctctgctttactaatgtctatgcagattcatttgtaattagaggtgatgaagtcagacaaatcgctccagggcaaactggaaagattgctgattataattataaattaccagatgattttacaggctgcgttatagcttggaattctaacaatcttgattctaaggttggtggtaattataattacctgtatagattgtttaggaagtctaatctcaaaccttttgagagagatatttcaactgaaatctatcaggccggtagcacaccttgtaatggtgttgaaggttttaattgttactttcctttacaatcatatggtttccaacccactaatggtgttggttaccaaccatacagagtagtagtactttcttttgaacttctacatgcaccagcaactgtttgtggacctaaaaagtctactaatttggttaaaaacaaatgtgtcaatttcaacttcaatggtttaacaggcacaggtgttcttactgagtctaacaaaaagtttctgcctttccaacaatttggcagagacattgctgacactactgatgctgtccgtgatccacagacacttgagattcttgacattacaccatgttcttttggtggtgtcagtgttataacaccaggaacaaatacttctaaccaggttgctgttctttatcaggatgttaactgcacagaagtccctgttgctattcatgcagatcaacttactcctacttggcgtgtttattctacaggttctaatgtttttcaaacacgtgcaggctgtttaataggggctgaacatgtcaacaactcatatgagtgtgacatacccattggtgcaggtatatgcgctagttatcagactcagactaattctcctcggcgggcacgtagtgtagctagtcaatccatcattgcctacactatgtcacttggtgcagaaaattcagttgcttactctaataactctattgccatacccacaaattttactattagtgttaccacagaaattctaccagtgtctatgaccaagacatcagtagattgtacaatgtacatttgtggtgattcaactgaatgcagcaatcttttgttgcaatatggcagtttttgtacacaattaaaccgtgctttaactggaatagctgttgaacaagacaaaaacacccaagaagtttttgcacaagtcaaacaaatttacaaaacaccaccaattaaagattttggtggttttaatttttcacaaatattaccagatccatcaaaaccaagcaagaggtcatttattgaagatctacttttcaacaaagtgacacttgcagatgctggcttcatcaaacaatatggtgattgccttggtgatattgctgctagagacctcatttgtgcacaaaagtttaacggccttactgttttgccacctttgctcacagatgaaatgattgctcaatacacttctgcactgttagcgggtacaatcacttctggttggacctttggtgcaggtgctgcattacaaataccatttgctatgcaaatggcttataggtttaatggtattggagttacacagaatgttctctatgagaaccaaaaattgattgccaaccaatttaatagtgctattggcaaaattcaagactcactttcttccacagcaagtgcacttggaaaacttcaagatgtggtcaaccaaaatgcacaagctttaaacacgcttgttaaacaacttagctccaattttggtgcaatttcaagtgttttaaatgatatcctttcacgtcttgacaaagttgaggctgaagtgcaaattgataggttgatcacaggcagacttcaaagtttgcagacatatgtgactcaacaattaattagagctgcagaaatcagagcttctgctaatcttgctgctactaaaatgtcagagtgtgtacttggacaatcaaaaagagttgatttttgtggaaagggctatcatcttatgtccttccctcagtcagcacctcatggtgtagtcttcttgcatgtgacttatgtccctgcacaagaaaagaacttcacaactgctcctgccatttgtcatgatggaaaagcacactttcctcgtgaaggtgtctttgtttcaaatggcacacactggtttgtaacacaaaggaatttttatgaaccacaaatcattactacagacaacacatttgtgtctggtaactgtgatgttgtaataggaattgtcaacaacacagtttatgatcctttgcaacctgaattagactcattcaaggaggagttagataaatattttaagaatcatacatcaccagatgttgatttaggtgacatctctggcattaatgcttcagttgtaaacattcaaaaagaaattgaccgcctcaatgaggttgccaagaatttaaatgaatctctcatcgatctccaagaacttggaaagtatgagcagtatataaaatggccatggtacatttggctaggttttatagctggcttgattgccatagtaatggtgacaattatgctttgctgtatgaccagttgctgtagttgtctcaagggctgttgttcttgtggatcctgctgcaaggccagaagcacaccaatcacactaagcaaggatcaactgagtggtataaataatattgcatttagtaactaaataaaaatagcacctaatcatgttcttacaatggtttactatctgctcatagacaacccatctatcattggattttcttaaaatctgaacttcatcgaaactcttatctataaaccatctcacttacactatttaagtagattcctagtttatagttatataaaacacaattgaatgccagtcgaccttaccatctgtaaaaatgaaaactggggcaaatatgtcacgaaggaatccttgcaaatttgaaattcgaggtcattgcttaaatggtaagaggtgtcattttagtcataattattttgaatggccaccccatgcactgcttgtaagacaaaactttatgttaaacagaatacttaagtctatggataaaagtatagataccttatcagaaataagtggagctgcagagttggacagaacagaagagtatgctcttggtgtagttggagtgctagagagttatataggatcaataaacaatataactaaacaatcagcatgtgttgccatgagcaaactcctcactgaactcaatagtgatgatatcaaaaagctgagggacaatgaagagctaaattcacccaagataagagtgtacaatactgtcatatcatatattgaaagcaacaggaaaaacaataaacaaactatccatctgttaaaaagattgccagcagacgtattgaagaaaaccatcaaaaacacattggatatccataagagcataaccatcaacaacccaaaagaatcaactgttagtgatacaaatgaccatgccaaaaataatgatactacctgacaaatatccttgtagtataacttccatactaataacaagtagatgtagagttactatgtataatcaaaagaacacactatatttcaatcaaaacaacccaaataaccatatgtactcaccgaatcaaacattcaatgaaatccattggacctctcaagaattgattgacacaattcaaaattttctacaacatctaggtattattgaggatatatatacaatatatatattagtgtcataacactcaattctaacactcaccacatcgttacattattaattcaaacaattcaagttgtgggacaaaatggatcccattattaatggaaattctgctaatgtttatctaaccgatagttatttaaaaggtgttatctctttctcagagtgtaatgctttaggaagttacatattcaatggtccttatctcaaaaatgattataccaacttaattagtagacaaaatccattaatagaacacatgaatctaaagaaactaaatataacacagtccttaatatctaagtatcataaaggtgaaataaaattagaagaacctacttattttcagtcattacttatgacatacaagagtatgacctcgtcagaacagattgctaccactaatttacttaaaaagataataagaagagctatagaaataagtgatgtcaaagtctatgctatattgaataaactagggcttaaagaaaaggacaagattaaatccaacaatggacaagatgaagacaactcagttattacgaccataatcaaagatgatatactttcagctgttaaagataatcaatctcatcttaaagcagacaaaaatcactctacaaaacaaaaagacacaatcaaaacaacactcttgaagaaattgatgtgttcaatgcaacatcctccatcatggttaatacattggtttaacttatacacaaaattaaacaacatattaacacagtatcgatcaaatgaggtaaaaaaccatgggtttacattgatagataatcaaactcttagtggatttcaatttattttgaaccaatatggttgtatagtttatcataaggaactcaaaagaattactgtgacaacctataatcaattcttgacatggaaagatattagccttagtagattaaatgtttgtttaattacatggattagtaactgcttgaacacattaaataaaagcttaggcttaagatgcggattcaataatgttatcttgacacaactattcctttatggagattgtatactaaagctatttcacaatgaggggttctacataataaaagaggtagagggatttattatgtctctaattttaaatataacagaagaagatcaattcagaaaacgattttataatagtatgctcaacaacatcacagatgctgctaataaagctcagaaaaatctgctatcaagagtatgtcatacattattagataagacagtgtccgataatataataaatggcagatggataattctattaagtaagttccttaaattaattaagcttgcaggtgacaataaccttaacaatctgagtgaactatattttttgttcagaatatttggacacccaatggtagatgaaagacaagccatggatgctgttaaaattaattgcaatgagaccaaattttacttgttaagcagtctgagtatgttaagaggtgcctttatatatagaattataaaagggtttgtaaataattacaacagatggcctactttaagaaatgctattgttttacccttaagatggttaacttactataaactaaacacttatccttctttgttggaacttacagaaagagatttgattgtgttatcaggactacgtttctatcgtgagtttcggttgcctaaaaaagtggatcttgaaatgattataaatgataaagctatatcacctcctaaaaatttgatatggactagtttccctagaaattacatgccatcacacatacaaaactatatagaacatgaaaaattaaaattttccgagagtgataaatcaagaagagtattagagtattatttaagagataacaaattcaatgaatgtgatttatacaactgtgtagttaatcaaagttatctcaacaaccctaatcatgtggtatcattgacaggcaaagaaagagaactcagtgtaggtagaatgtttgcaatgcaaccgggaatgttcagacaggttcaaatattggcagagaaaatgatagctgaaaacattttacaattctttcctgaaagtcttacaagatatggtgatctagaactacaaaaaatattagaattgaaagcaggaataagtaacaaatcaaatcgctacaatgataattacaacaattacattagtaagtgctctatcatcacagatctcagcaaattcaatcaagcatttcgatatgaaacgtcatgtatttgtagtgatgtgctggatgaactgcatggtgtacaatctctattttcctggttacatttaactattcctcatgtcacaataatatgcacatataggcatgcacccccctatataggagatcatattgtagatcttaacaatgtagatgaacaaagtggattatatagatatcacatgggtggcatcgaagggtggtgtcaaaaactgtggaccatagaagctatatcactattggatctaatatctctcaaagggaaattctcaattactgctttaattaatggtgacaatcaatcaatagatataagcaaaccaatcagactcatggaaggtcaaactcatgctcaagcagattatttgctagcattaaatagccttaaattactgtataaagagtatgcaggcataggccacaaattaaaaggaactgagacttatatatcacgagatatgcaatttatgagtaaaacaattcaacataacggtgtatattacccagctagtataaagaaagtcctaagagtgggaccgtggataaacactatacttgatgatttcaaagtgagtctagaatctataggtagtttgacacaagaattagaatatagaggtgaaagtctattatgcagtttaatatttagaaatgtatggttatataatcagattgctctacaattaaaaaatcatgcattatgtaacaataaactatatttggacatattaaaggttctgaaacacttaaaaaccttttttaatcttgataatattgatacagcattaacattgtatatgaatttacccatgttatttggtggtggtgatcccaacttgttatatcgaagtttctatagaagaactcctgacttcctcacagaggctatagttcactctgtgttcatacttagttattatacaaaccatgacttaaaagataaacttcaagatctgtcagatgatagattgaataagttcttaacatgcataatcacgtttgacaaaaaccctaatgctgaattcgtaacattgatgagagatcctcaagctttagggtctgagagacaagctaaaattactagcgaaatcaatagactggcagttacagaggttttgagtacagctccaaacaaaatattctccaaaagtgcacaacattatactactacagagatagatctaaatgatattatgcaaaatatagaacctacatatcctcatgggctaagagttgtttatgaaagtttacccttttataaagcagagaaaatagtaaatcttatatcaggtacaaaatctataactaacatactggaaaaaacttctgccatagacttaacagatattgatagagccactgagatgatgaggaaaaacataactttgcttataaggatacttccattggattgtaacagagataaaagagagatattgagtatggaaaacctaagtattactgaattaagcaaatatgttagggaaagatcttggtctttatccaatatagttggtgttacatcacccagtatcatgtatacaatggacatcaaatatactacaagcactatatctagtggcataattatagagaaatataatgttaacagtttaacacgtggtgagagaggacccactaaaccatgggttggttcatctacacaagagaaaaaaacaatgccagtttataatagacaagtcttaaccaaaaaacagagagatcaaatagatctattagcaaaattggattgggtgtatgcatctatagataacaaggatgaattcatggaagaactcagcataggaacccttgggttaacatatgaaaaggccaagaaattatttccacaatatttaagtgtcaattatttgcatcgccttacagtcagtagtagaccatgtgaattccctgcatcaataccagcttatagaacaacaaattatcactttgacactagccctattaatcgcatattaacagaaaagtatggtgatgaagatattgacatagtattccaaaactgtataagctttggccttagtttaatgtcagtagtagaacaatttactaatgtatgtcctaacagaattattctcatacctaagcttaatgagatacatttgatgaaacctcccatattcacaggtgatgttgatattcacaagttaaaacaagtgatacaaaaacagcatatgtttttaccagacaaaataagtttgactcaatatgtggaattattcttaagtaataaaacactcaaatctggatctcatgttaattctaatttaatattggcacataaaatatctgactattttcataatacttacattttaagtactaatttagctggacattggattctgattatacaacttatgaaagattctaaaggtatttttgaaaaagattggggagagggatatataactgatcatatgtttattaatttgaaagttttcttcaatgcttataagacctatctcttgtgttttcataaaggttatggcaaagcaaagctggagtgtgatatgaacacttcagatcttctatgtgtattggaattaatagacagtagttattggaagtctatgtctaaggtatttttagaacaaaaagttatcaaatacattcttagccaagatgcaagtttacatagagtaaaaggatgtcatagcttcaaattatggtttcttaaacgtcttaatgtagcagaattcacagtttgcccttgggttgttaacatagattatcatccaacacatatgaaagcaatattaacttatatagatcttgttagaatgggattgataaatatagatagaatacacattaaaaataaacacaaattcaatgatgaattttatacttctaatctcttctacattaattataacttctcagataatactcatctattaactaaacatataaggattgctaattctgaattagaaaataattacaacaaattatatcatcctacaccagaaaccctagagaatatactagccaatccgattaaaagtaatgacaaaaagacactgaatgactattgtataggtaaaaatgttgactcaataatgttaccattgttatctaataagaagcttattaaatcgtctgcaatgattagaaccaattacagcaaacaagatttgtataatttattccctatggttgtgattgatagaattatagatcattcaggcaatacagccaaatccaaccaactttacactactacttcccaccaaatatctttagtgcacaatagcacatcactttactgcatgcttccttggcatcatattaatagattcaattttgtatttagttctacaggttgtaaaattagtatagagtatattttaaaagatcttaaaattaaagatcccaattgtatagcattcataggtgaaggagcagggaatttattattgcgtacagtagtggaacttcatcctgacataagatatatttacagaagtctgaaagattgcaatgatcatagtttacctattgagtttttaaggctgtacaatggacatatcaacattgattatggtgaaaatttgaccattcctgctacagatgcaaccaacaacattcattggtcttatttacatataaagtttgctgaacctatcagtctttttgtctgtgatgccgaattgtctgtaacagtcaactggagtaaaattataatagaatggagcaagcatgtaagaaagtgcaagtactgttcctcagttaataaatgtatgttaatagtaaaatatcatgctcaagatgatattgatttcaaattagacaatataactatattaaaaacttatgtatgcttaggcagtaagttaaagggatcggaggtttacttagtccttacaataggtcctgcgaatatattcccagtatttaatgtagtacaaaatgctaaattgatactatcaagaaccaaaaatttcatcatgcctaagaaagctgataaagagtctattgatgcaaatattaaaagtttgataccctttctttgttaccctataacaaaaaaaggaattaatactgcattgtcaaaactaaagagtgttgttagtggagatatactatcatattctatagctggacgtaatgaagttttcagcaataaacttataaatcataagcatatgaacatcttaaaatggttcaatcatgttttaaatttcagatcaacagaactaaactataaccatttatatatggtagaatctacatatccttacctaagtgaattgttaaacagcttgacaaccaatgaacttaaaaaactgattaaaatcacaggtagtctgttatacaactttcataatgaataatgaataaagatcttataataaaaattcccatagctatacactaacactgtattcaattatagttattaaaaattaaaaatcgtacgattttttaaataacttttagtgaactaatcctaaagttatcattttaatcttggaggaataaatttaaaccctaatctaattggtttatatgtgtattaactaaattacgagatattagtttttgacactttttttctcgtgggtcggcatggcatctccacctcctcgcggtccgacctgggcatccgaaggaggacgcacgtccactcggatggctaagggagctgctaacaaagcccgaaaggaagctgagttggctgctgccaccgctgagcaataactagcataaccccttggggcctctaaacgggtcttgaggggttttttgctgaaaggaggaactatatacgcgtaagcttctcgacccattctcatgtttgacagcttatcatcgaatttctgccattcatccgcttattatcacttattcaggcgtagcaaccaggcgtttaagggcaccaataactgccttaaaaaaattacgccccgccctgccactcatcgcagtactgttgtaattcattaagcattctgccgacatggaagccatcacagacggcatgatgaacctgaatcgccagcggcatcagcaccttgtcgccttgcgtataatatttgcccatggtgaaaacgggggcgaagaagttgtccatattggccacgtttaaatcaaaactggtgaaactcacccagggattggctgagacgaaaaacatattctcaataaaccctttagggaaataggccaggttttcaccgtaacacgccacatcttgcgaatatatgtgtagaaactgccggaaatcgtcgtggtattcactccagagcgatgaaaacgtttcagtttgctcatggaaaacggtgtaacaagggtgaacactatcccatatcaccagctcaccgtctttcattgccatacggaattccggatgagcattcatcaggcgggcaagaatgtgaataaaggccggataaaacttgtgcttatttttctttacggtctttaaaaaggccgtaatatccagctgaacggtctggttataggtacattgagcaactgactgaaatgcctcaaaatgttctttacgatgccattgggatatatcaacggtggtatatccagtgatttttttctccattttagcttccttagctcctgaaaatctcgataactcaaaaaatacgcccggtagtgatcttatttcattatggtgaaagttggaacctcttacgtgccgatcaacgtctcattttcgccaaaagttggcccagggcttcccggtatcaacagggacaccaggatttatttattctgcgaagtgatcttccgtcacaggtatttattcgcgataagctcatggagcggcgtaaccgtcgcacaggaaggacagagaaagcgcggatctgggaagtgacggacagaacggtcaggacctggattggggaggcggttgccgccgctgctgctgacggtgtgacgttctctgttccggtcacaccacatacgttccgccattcctatgcgatgcacatgctgtatgccggtataccgctgaaagttctgcaaagcctgatgggacataagtccatcagttcaacggaagtctacacgaaggtttttgcgctggatgtggctgcccggcaccgggtgcagtttgcgatgccggagtctgatgcggttgcgatgctgaaacaattatcctgagaataaatgccttggcctttatatggaaatgtggaactgagtggatatgctgtttttgtctgttaaacagagaagctggctgttatccactgagaagcgaacgaaacagtcgggaaaatctcccattatcgtagagatccgcattattaatctcaggagcctgtgtagcgtttataggaagtagtgttctgtcatgatgcctgcaagcggtaacgaaaacgatttgaatatgccttcaggaacaatagaaatcttcgtgcggtgttacgttgaagtggagcggattatgtcagcaatggacagaacaacctaatgaacacagaaccatgatgtggtctgtccttttacagccagtaggctcgccgcagtcgagcgacggcgaagccctcgagtgagcgaggaagcaccagggaacagcacttatatattctgcttacacacgatgcctgaaaaaacttcccttggggttatccacttatccacggggatatttttataattattttttttatagtttttagatcttcttttttagagcgccttgtaggcctttatccatgctggttctagagaaggtgttgtgacaaattgccctttcagtgtgacaaatcaccctcaaatgacagtcctgtctgtgacaaattgcccttaaccctgtgacaaattgccctcagaagaagctgttttttcacaaagttatccctgcttattgactcttttttatttagtgtgacaatctaaaaacttgtcacacttcacatggatctgtcatggcggaaacagcggttatcaatcacaagaaacgtaaaaatagcccgcgaatcgtccagtcaaacgacctcactgaggcggcatatagtctctcccgggatcaaaaacgtatgctgtatctgttcgttgaccagatcagaaaatctgatggcaccctacaggaacatgacggtatctgcgagatccatgttgctaaatatgctgaaatattcggattgacctctgcggaagccagtaaggatatacggcaggcattgaagagtttcgcggggaaggaagtggttttttatcgccctgaagaggatgccggcgatgaaaaaggctatgaatcttttccttggtttatcaaacgtgcgcacagtccatccagagggctttacagtgtacatatcaacccatatctcattcccttctttatcgggttacagaaccggtttacgcagtttcggcttagtgaaacaaaagaaatcaccaatccgtatgccatgcgtttatacgaatccctgtgtcagtatcgtaagccggatggctcaggcatcgtctctctgaaaatcgactggatcatagagcgttaccagctgcctcaaagttaccagcgtatgcctgacttccgccgccgcttcctgcaggtctgtgttaatgagatcaacagcagaactccaatgcgcctctcatacattgagaaaaagaaaggccgccagacgactcatatcgtattttccttccgcgatatcacttccatgacgacaggatagtctgagggttatctgtcacagatttgagggtggttcgtcacatttgttctgacctactgagggtaatttgtcacagttttgctgtttccttcagcctgcatggattttctcatactttttgaactgtaatttttaaggaagccaaatttgagggcagtttgtcacagttgatttccttctctttcccttcgtcatgtgacctgatatcgggggttagttcgtcatcattgatgagggttgattatcacagtttattactctgaattggctatccgcgtgtgtacctctacctggagtttttcccacggtggatatttcttcttgcgctgagcgtaagagctatctgacagaacagttcttctttgcttcctcgccagttcgctcgctatgctcggttacacggctgcggcgagcgctagtgataataagtgactgaggtatgtgctcttcttatctccttttgtagtgttgctcttattttaaacaactttgcggttttttgatgactttgcgattttgttgttgctttgcagtaaattgcaagatttaataaaaaaacgcaaagcaatgattaaaggatgttcagaatgaaactcatggaaacacttaaccagtgcataaacgctggtcatgaaatgacgaaggctatcgccattgcacagtttaatgatgacagcccggaagcgaggaaaataacccggcgctggagaataggtgaagcagcggatttagttggggtttcttctcaggctatcagagatgccgagaaagcagggcgactaccgcacccggatatggaaattcgaggacgggttgagcaacgtgttggttatacaattgaacaaattaatcatatgcgtgatgtgtttggtacgcgattgcgacgtgctgaagacgtatttccaccggtgatcggggttgctgcccataaaggtggcgtttacaaaacctcagtttctgttcatcttgctcaggatctggctctgaaggggctacgtgttttgctcgtggaaggtaacgacccccagggaacagcctcaatgtatcacggatgggtaccagatcttcatattcatgcagaagacactctcctgcctttctatcttggggaaaaggacgatgtcacttatgcaataaagcccacttgctggccggggcttgacattattccttcctgtctggctctgcaccgtattgaaactgagttaatgggcaaatttgatgaaggtaaactgcccaccgatccacacctgatgctccgactggccattgaaactgttgctcatgactatgatgtcatagttattgacagcgcgcctaacctgggtatcggcacgattaatgtcgtatgtgctgctgatgtgctgattgttcccacgcctgctgagttgtttgactacacctccgcactgcagtttttcgatatgcttcgtgatctgctcaagaacgttgatcttaaagggttcgagcctgatgtacgtattttgcttaccaaatacagcaatagtaatggctctcagtccccgtggatggaggagcaaattcgggatgcctggggaagcatggttctaaaaaatgttgtacgtgaaacggatgaagttggtaaaggtcagatccggatgagaactgtttttgaacaggccattgatcaacgctcttcaactggtgcctggagaaatgctctttctatttgggaacctgtctgcaatgaaattttcgatcgtctgattaaaccacgctgggagattagataatgaagcgtgcgcctgttattccaaaacatacgctcaatactcaaccggttgaagatacttcgttatcgacaccagctgccccgatggtggattcgttaattgcgcgcgtaggagtaatggctcgcggtaatgccattactttgcctgtatgtggtcgggatgtgaagtttactcttgaagtgctccggggtgatagtgttgagaagacctctcgggtatggtcaggtaatgaacgtgaccaggagctgcttactgaggacgcactggatgatctcatcccttcttttctactgactggtcaacagacaccggcgttcggtcgaagagtatctggtgtcatagaaattgccgatgggagtcgccgtcgtaaagctgctgcacttaccgaaagtgattatcgtgttctggttggcgagctggatgatgagcagatggctgcattatccagattgggtaacgattatcgcccaacaagtgcttatgaacgtggtcagcgttatgcaagccgattgcagaatgaatttgctggaaatatttctgcgctggctgatgcggaaaatatttcacgtaagattattacccgctgtatcaacaccgccaaattgcctaaatcagttgttgctcttttttctcaccccggtgaactatctgcccggtcaggtgatgcacttcaaaaagcctttacagataaagaggaattacttaagcagcaggcatctaaccttcatgagcagaaaaaagctggggtgatatttgaagctgaagaagttatcactcttttaacttctgtgcttaaaacgtcatctgcatcaagaactagtttaagctcacgacatcagtttgctcctggagcgacagtattgtataagggcgataaaatggtgcttaacctggacaggtctcgtgttccaactgagtgtatagagaaaattgaggccattcttaaggaacttgaaaagccagcaccctgatgcgaccacgttttagtctacgtttatctgtctttacttaatgtcctttgttacaggccagaaagcataactggcctgaatattctctctgggcccactgttccacttgtatcgtcggtctgataatcagactgggaccacggtcccactcgtatcgtcggtctgattattagtctgggaccacggtcccactcgtatcgtcggtctgattattagtctgggaccacggtcccactcgtatcgtcggtctgataatcagactgggaccacggtcccactcgtatcgtcggtctgattattagtctgggaccatggtcccactcgtatcgtcggtctgattattagtctgggaccacggtcccactcgtatcgtcggtctgattattagtctggaaccacggtcccactcgtatcgtcggtctgattattagtctgggaccacggtcccactcgtatcgtcggtctgattattagtctgggaccacgatcccactcgtgttgtcggtctgattatcggtctgggaccacggtcccacttgtattgtcgatcagactatcagcgtgagactacgattccatcaatgcctgtcaagggcaagtattgacatgtcgtcgtaacctgtagaacggagtaacctcggtgtgcggttgtatgcctgctgtggattgctgctgtgtcctgcttatccacaacattttgcgcacggttatgtggacaaaatacctggttacccaggccgtgccggcacgttaaccgggctgcatccgatgcaagtgtgtcgctgtcgagttt

SEQ ID NO: 132 - DNA, 22638 bp, Artificial Sequence
  Description of Artificial Sequence: Synthetic polynucleotide
aaacggatccttcgaaacgaaattaatacgactcactatagggaagtttttcgcgtctgatgaggccgttaggccgaaactcctctccggagtcacgcgaaaaaatgcgtacaacaaacttgcataaaccaaaaaaatggggcaaataagaatttgataagtaccacttaaatttaactcccttgcttagcgatgggttcgaattcgctatcgatgataaaagtacgtctacaaaatctatttgataatgatgaagtagcgctactaaaaataacgtgttatacggataaactaatacatctaacgaatgcgctagcgaaagcggtaatacatacgataaaactaaatggtatagtatttgtacatgtaataacgtcgtcggatatatgtccgaataataatatagtagtaaaatcgaattttacgacgatgccggtactacaaaatggtggttatatatgggaaatgatggaactaacgcattgttcgcaaccgaatggtctactagatgataattgtgaaataaaattttcgaaaaaactatcggattcgacgatgacgaattatatgaatcaactatcggaactactaggttttgatctaaatccgtaaattataattaatatcaactagcaaatcaatgtcactaacaccattagttaatataaaacttaacagaagacaaaaatggggcaaataaatcaattcagccaacccaaccatggatacgacgcataatgataatacgccgcaacgtctaatgataacggatatgcgtccgctatcgctagaaacgataataacgtcgctaacgcgtgatataataacgcataaatttatatatctaataaatcatgaatgtatagtacgtaaactagatgaacgtcaagcgacgtttacgtttctagtaaattatgaaatgaaactactacataaagtaggttcgacgaaatataaaaaatatacggaatataatacgaaatatggtacgtttccgatgccgatatttataaatcatgatggttttctagaatgtataggtataaaaccgacgaaacatacgccgataatatataaatatgatctaaatccgtaaatttcaacacaatattcacacaatctaaaacaacaactctatgcataactatactccatagtccagatggagcctgaaaattatagtaatttaaaattaaggagagatataagatagaagatggggcaaatacaaagatggctcttagcaaagtcaagttgaatgatacactcaacaaagatcaacttctgtcatccagcaaatacaccatccaacggagcacaggagatagtattgatactcctaattatgatgtgcagaaacacatcaataagttatgtggcatgttattaatcacagaagatgctaatcataaattcactgggttaataggtatgttatatgcgatgtctaggttaggaagagaagacaccataaaaatactcagagatgcgggatatcatgtaaaagcaaatggagtagatgtaacaacacatcgtcaagacattaatggaaaagaaatgaaatttgaagtgttaacattggcaagcttaacaactgaaattcaaatcaacattgagatagaatctagaaaatcctacaaaaaaatgctaaaagaaatgggagaggtagctccagaatacaggcatgactctcctgattgtgggatgataatattatgtatagcagcattagtaataactaaattagcagcaggggacagatctggtcttacagccgtgattaggagagctaataatgtcctaaaaaatgaaatgaaacgttacaaaggcttactacccaaggacatagccaacagcttctatgaagtgtttgaaaaacatccccactttatagatgtttttgttcattttggtatagcacaatcttctaccagaggtggcagtagagttgaagggatttttgcaggattgtttatgaatgcctatggtgcagggcaagtgatgttacggtggggagtcttagcaaaatcagttaaaaatattatgttaggacatgctagtgtgcaagcagaaatggaacaagttgttgaggtttatgaatatgcccaaaaattgggtggtgaagcaggattctaccatatattgaacaacccaaaagcatcattattatctttgactcaatttcctcacttctccagtgtagtattaggcaatgctgctggcctaggcataatgggagagtacagaggtacaccgaggaatcaagatctatatgatgcagcaaaggcatatgctgaacaactcaaagaaaatggtgtgattaactacagtgtactagacttgacagcagaagaactagaggctatcaaacatcagcttaatccaaaagataatgatgtagagctttgagttaataaaaaatggggcaaataaatcatcatggaaaagtttgctcctgaattccatggagaagatgcaaacaacagggctactaaattcctagaatcaataaagggcaaattcacatcacccaaagatcccaagaaaaaagatagtatcatatctgtcaactcaatagatatagaagtaaccaaagaaagccctataacatcaaattcaactattatcaacccaacaaatgagacagatgatactgcagggaacaagcccaattatcaaagaaaacctctagtaagtttcaaagaagaccctacaccaagtgataatcccttttctaaactatacaaagaaaccatagaaacatttgataacaatgaagaagaatccagctattcatacgaagaaataaatgatcagacaaacgataatataacagcaagattagataggattgatgaaaaattaagtgaaatactaggaatgcttcacacattagtagtggcaagtgcaggacctacatctgctcgggatggtataagagatgccatgattggtttaagagaagaaatgatagaaaaaatcagaactgaagcattaatgaccaatgacagattagaagctatggcaagactcaggaatgaggaaagtgaaaagatggcaaaagacacatcagatgaagtgtctctcaatccaacatcagagaaattgaacaacctattggaagggaatgatagtgacaatgatctatcacttgaagatttctgattagttaccactcttcacatcaacacacaataccaacagaagaccaacaaactaaccaacccaatcatccaaccaaacatccatccgccaatcagccaaacagccaacaaaacaaccagccaatccaaaactaaccacccggaaaaaatctataatatagttacaaaaaaaggaaagggtggggcaaatatggaaacatacgtgaacaagcttcacgaaggctccacatacacagctgctgttcaatacaatgtcttagaaaaagacgatgaccctgcatcacttacaatatgggtgcccatgttccaatcatctatgccagcagatttacttataaaagaactagctaatgtcaacatactagtgaaacaaatatccacacccaagggaccttcactaagagtcatgataaactcaagaagtgcagtgctagcacaaatgcccagcaaatttaccatatgcgctaatgtgtccttggatgaaagaagcaaactagcatatgatgtaaccacaccctgtgaaatcaaggcatgtagtctaacatgcctaaaatcaaaaaatatgttgactacagttaaagatctcactatgaagacactcaaccctacacatgatattattgctttatgtgaatttgaaaacatagtaacatcaaaaaaagtcataataccaacatacctaagatccatcagtgtcagaaataaagatctgaacacacttgaaaatataacaaccactgaattcaaaaatgctatcacaaatgcaaaaatcatcccttactcaggattactattagtcatcacagtgactgacaacaaaggagcattcaaatacataaagccacaaagtcaattcatagtagatcttggagcttacctagaaaaagaaagtatatattatgttaccacaaattggaagcacacagctacacgatttgcaatcaaacccatggaagattaacctttttcctctacatcagtgtgttaattcatacaaactttctacctacattcttcacttcaccatcacaatcacaaacactctgtggttcaaccaatcaaacaaaacttatctgaagtcccagatcatcccaagtcattgtttatcagatctagtactcaaataagttaataaaaaatatacacatggacgtccatggggcaaatgcaaacatgtttgtttttcttgttttattgccactagtctctagtcagtgtgttaatcttacaaccagaactcaattaccccctgcatacactaattctttcacacgtggtgtttattaccctgacaaagttttcagatcctcagttttacattcaactcaggacttgttcttacctttcttttccaatgttacttggttccatgctatacatgtctctgggaccaatggtactaagaggtttgataaccctgtcctaccatttaatgatggtgtttattttgcttccactgagaagtctaacataataagaggctggatttttggtactactttagattcgaagacccagtccctacttattgttaataacgctactaatgttgttattaaagtctgtgaatttcaattttgtaatgatccatttttgggtgtttattaccacaaaaacaacaaaagttggatggaaagtgagttcagagtttattctagtgcgaataattgcacttttgaatatgtctctcagccttttcttatggaccttgaaggaaaacagggtaatttcaaaaatcttagggaatttgtgtttaagaatattgatggttattttaaaatatattctaagcacacgcctattaatttagtgcgtgatctccctcagggtttttcggctttagaaccattggtagatttgccaataggtattaacatcactaggtttcaaactttacttgctttacatagaagttatttgactcctggtgattcttcttcaggttggacagctggtgctgcagcttattatgtgggttatcttcaacctaggacttttctattaaaatataatgaaaatggaaccattacagatgctgtagactgtgcacttgaccctctctcagaaacaaagtgtacgttgaaatccttcactgtagaaaaaggaatctatcaaacttctaactttagagtccaaccaacagaatctattgttagatttcctaatattacaaacttgtgcccttttggtgaagtttttaacgccaccagatttgcatctgtttatgcttggaacaggaagagaatcagcaactgtgttgctgattattctgtcctatataattccgcatcattttccacttttaagtgttatggagtgtctcctactaaattaaatgatctctgctttactaatgtctatgcagattcatttgtaattagaggtgatgaagtcagacaaatcgctccagggcaaactggaaagattgctgattataattataaattaccagatgattttacaggctgcgttatagcttggaattctaacaatcttgattctaaggttggtggtaattataattacctgtatagattgtttaggaagtctaatctcaaaccttttgagagagatatttcaactgaaatctatcaggccggtagcacaccttgtaatggtgttgaaggttttaattgttactttcctttacaatcatatggtttccaacccactaatggtgttggttaccaaccatacagagtagtagtactttcttttgaacttctacatgcaccagcaactgtttgtggacctaaaaagtctactaatttggttaaaaacaaatgtgtcaatttcaacttcaatggtttaacaggcacaggtgttcttactgagtctaacaaaaagtttctgcctttccaacaatttggcagagacattgctgacactactgatgctgtccgtgatccacagacacttgagattcttgacattacaccatgttcttttggtggtgtcagtgttataacaccaggaacaaatacttctaaccaggttgctgttctttatcaggatgttaactgcacagaagtccctgttgctattcatgcagatcaacttactcctacttggcgtgtttattctacaggttctaatgtttttcaaacacgtgcaggctgtttaataggggctgaacatgtcaacaactcatatgagtgtgacatacccattggtgcaggtatatgcgctagttatcagactcagactaattctcctcggcgggcacgtagtgtagctagtcaatccatcattgcctacactatgtcacttggtgcagaaaattcagttgcttactctaataactctattgccatacccacaaattttactattagtgttaccacagaaattctaccagtgtctatgaccaagacatcagtagattgtacaatgtacatttgtggtgattcaactgaatgcagcaatcttttgttgcaatatggcagtttttgtacacaattaaaccgtgctttaactggaatagctgttgaacaagacaaaaacacccaagaagtttttgcacaagtcaaacaaatttacaaaacaccaccaattaaagattttggtggttttaatttttcacaaatattaccagatccatcaaaaccaagcaagaggtcatttattgaagatctacttttcaacaaagtgacacttgcagatgctggcttcatcaaacaatatggtgattgccttggtgatattgctgctagagacctcatttgtgcacaaaagtttaacggccttactgttttgccacctttgctcacagatgaaatgattgctcaatacacttctgcactgttagcgggtacaatcacttctggttggacctttggtgcaggtgctgcattacaaataccatttgctatgcaaatggcttataggtttaatggtattggagttacacagaatgttctctatgagaaccaaaaattgattgccaaccaatttaatagtgctattggcaaaattcaagactcactttcttccacagcaagtgcacttggaaaacttcaagatgtggtcaaccaaaatgcacaagctttaaacacgcttgttaaacaacttagctccaattttggtgcaatttcaagtgttttaaatgatatcctttcacgtcttgacaaagttgaggctgaagtgcaaattgataggttgatcacaggcagacttcaaagtttgcagacatatgtgactcaacaattaattagagctgcagaaatcagagcttctgctaatcttgctgctactaaaatgtcagagtgtgtacttggacaatcaaaaagagttgatttttgtggaaagggctatcatcttatgtccttccctcagtcagcacctcatggtgtagtcttcttgcatgtgacttatgtccctgcacaagaaaagaacttcacaactgctcctgccatttgtcatgatggaaaagcacactttcctcgtgaaggtgtctttgtttcaaatggcacacactggtttgtaacacaaaggaatttttatgaaccacaaatcattactacagacaacacatttgtgtctggtaactgtgatgttgtaataggaattgtcaacaacacagtttatgatcctttgcaacctgaattagactcattcaaggaggagttagataaatattttaagaatcatacatcaccagatgttgatttaggtgacatctctggcattaatgcttcagttgtaaacattcaaaaagaaattgaccgcctcaatgaggttgccaagaatttaaatgaatctctcatcgatctccaagaacttggaaagtatgagcagtatataaaatggccatggtacatttggctaggttttatagctggcttgattgccatagtaatggtgacaattatgctttgctgtatgaccagttgctgtagttgtctcaagggctgttgttcttgtggatcctgctgcaaatttgatgaagacgacaaggccagaagcacaccaatcacactaagcaaggatcaactgagtggtataaataatattgcatttagtaactaaataaaaatagcacctaatcatgttcttacaatggtttactatctgctcatagacaacccatctatcattggattttcttaaaatctgaacttcatcgaaactcttatctataaaccatctcacttacactatttaagtagattcctagtttatagttatataaaacacaattgaatgccagtcgaccttaccatctgtaaaaatgaaaactggggcaaatatgtcacgaaggaatccttgcaaatttgaaattcgaggtcattgcttaaatggtaagaggtgtcattttagtcataattattttgaatggccaccccatgcactgcttgtaagacaaaactttatgttaaacagaatacttaagtctatggataaaagtatagataccttatcagaaataagtggagctgcagagttggacagaacagaagagtatgctcttggtgtagttggagtgctagagagttatataggatcaataaacaatataactaaacaatcagcatgtgttgccatgagcaaactcctcactgaactcaatagtgatgatatcaaaaagctgagggacaatgaagagctaaattcacccaagataagagtgtacaatactgtcatatcatatattgaaagcaacaggaaaaacaataaacaaactatccatctgttaaaaagattgccagcagacgtattgaagaaaaccatcaaaaacacattggatatccataagagcataaccatcaacaacccaaaagaatcaactgttagtgatacaaatgaccatgccaaaaataatgatactacctgacaaatatccttgtagtataacttccatactaataacaagtagatgtagagttactatgtataatcaaaagaacacactatatttcaatcaaaacaacccaaataaccatatgtactcaccgaatcaaacattcaatgaaatccattggacctctcaagaattgattgacacaattcaaaattttctacaacatctaggtattattgaggatatatatacaatatatatattagtgtcataacactcaattctaacactcaccacatcgttacattattaattcaaacaattcaagttgtgggacaaaatggatcccattattaatggaaattctgctaatgtttatctaaccgatagttatttaaaaggtgttatctctttctcagagtgtaatgctttaggaagttacatattcaatggtccttatctcaaaaatgattataccaacttaattagtagacaaaatccattaatagaacacatgaatctaaagaaactaaatataacacagtccttaatatctaagtatcataaaggtgaaataaaattagaagaacctacttattttcagtcattacttatgacatacaagagtatgacctcgtcagaacagattgctaccactaatttacttaaaaagataataagaagagctatagaaataagtgatgtcaaagtctatgctatattgaataaactagggcttaaagaaaaggacaagattaaatccaacaatggacaagatgaagacaactcagttattacgaccataatcaaagatgatatactttcagctgttaaagataatcaatctcatcttaaagcagacaaaaatcactctacaaaacaaaaagacacaatcaaaacaacactcttgaagaaattgatgtgttcaatgcaacatcctccatcatggttaatacattggtttaacttatacacaaaattaaacaacatattaacacagtatcgatcaaatgaggtaaaaaaccatgggtttacattgatagataatcaaactcttagtggatttcaatttattttgaaccaatatggttgtatagtttatcataaggaactcaaaagaattactgtgacaacctataatcaattcttgacatggaaagatattagccttagtagattaaatgtttgtttaattacatggattagtaactgcttgaacacattaaataaaagcttaggcttaagatgcggattcaataatgttatcttgacacaactattcctttatggagattgtatactaaagctatttcacaatgaggggttctacataataaaagaggtagagggatttattatgtctctaattttaaatataacagaagaagatcaattcagaaaacgattttataatagtatgctcaacaacatcacagatgctgctaataaagctcagaaaaatctgctatcaagagtatgtcatacattattagataagacagtgtccgataatataataaatggcagatggataattctattaagtaagttccttaaattaattaagcttgcaggtgacaataaccttaacaatctgagtgaactatattttttgttcagaatatttggacacccaatggtagatgaaagacaagccatggatgctgttaaaattaattgcaatgagaccaaattttacttgttaagcagtctgagtatgttaagaggtgcctttatatatagaattataaaagggtttgtaaataattacaacagatggcctactttaagaaatgctattgttttacccttaagatggttaacttactataaactaaacacttatccttctttgttggaacttacagaaagagatttgattgtgttatcaggactacgtttctatcgtgagtttcggttgcctaaaaaagtggatcttgaaatgattataaatgataaagctatatcacctcctaaaaatttgatatggactagtttccctagaaattacatgccatcacacatacaaaactatatagaacatgaaaaattaaaattttccgagagtgataaatcaagaagagtattagagtattatttaagagataacaaattcaatgaatgtgatttatacaactgtgtagttaatcaaagttatctcaacaaccctaatcatgtggtatcattgacaggcaaagaaagagaactcagtgtaggtagaatgtttgcaatgcaaccgggaatgttcagacaggttcaaatattggcagagaaaatgatagctgaaaacattttacaattctttcctgaaagtcttacaagatatggtgatctagaactacaaaaaatattagaattgaaagcaggaataagtaacaaatcaaatcgctacaatgataattacaacaattacattagtaagtgctctatcatcacagatctcagcaaattcaatcaagcatttcgatatgaaacgtcatgtatttgtagtgatgtgctggatgaactgcatggtgtacaatctctattttcctggttacatttaactattcctcatgtcacaataatatgcacatataggcatgcacccccctatataggagatcatattgtagatcttaacaatgtagatgaacaaagtggattatatagatatcacatgggtggcatcgaagggtggtgtcaaaaactgtggaccatagaagctatatcactattggatctaatatctctcaaagggaaattctcaattactgctttaattaatggtgacaatcaatcaatagatataagcaaaccaatcagactcatggaaggtcaaactcatgctcaagcagattatttgctagcattaaatagccttaaattactgtataaagagtatgcaggcataggccacaaattaaaaggaactgagacttatatatcacgagatatgcaatttatgagtaaaacaattcaacataacggtgtatattacccagctagtataaagaaagtcctaagagtgggaccgtggataaacactatacttgatgatttcaaagtgagtctagaatctataggtagtttgacacaagaattagaatatagaggtgaaagtctattatgcagtttaatatttagaaatgtatggttatataatcagattgctctacaattaaaaaatcatgcattatgtaacaataaactatatttggacatattaaaggttctgaaacacttaaaaaccttttttaatcttgataatattgatacagcattaacattgtatatgaatttacccatgttatttggtggtggtgatcccaacttgttatatcgaagtttctatagaagaactcctgacttcctcacagaggctatagttcactctgtgttcatacttagttattatacaaaccatgacttaaaagataaacttcaagatctgtcagatgatagattgaataagttcttaacatgcataatcacgtttgacaaaaaccctaatgctgaattcgtaacattgatgagagatcctcaagctttagggtctgagagacaagctaaaattactagcgaaatcaatagactggcagttacagaggttttgagtacagctccaaacaaaatattctccaaaagtgcacaacattatactactacagagatagatctaaatgatattatgcaaaatatagaacctacatatcctcatgggctaagagttgtttatgaaagtttacccttttataaagcagagaaaatagtaaatcttatatcaggtacaaaatctataactaacatactggaaaaaacttctgccatagacttaacagatattgatagagccactgagatgatgaggaaaaacataactttgcttataaggatacttccattggattgtaacagagataaaagagagatattgagtatggaaaacctaagtattactgaattaagcaaatatgttagggaaagatcttggtctttatccaatatagttggtgttacatcacccagtatcatgtatacaatggacatcaaatatactacaagcactatatctagtggcataattatagagaaatataatgttaacagtttaacacgtggtgagagaggacccactaaaccatgggttggttcatctacacaagagaaaaaaacaatgccagtttataatagacaagtcttaaccaaaaaacagagagatcaaatagatctattagcaaaattggattgggtgtatgcatctatagataacaaggatgaattcatggaagaactcagcataggaacccttgggttaacatatgaaaaggccaagaaattatttccacaatatttaagtgtcaattatttgcatcgccttacagtcagtagtagaccatgtgaattccctgcatcaataccagcttatagaacaacaaattatcactttgacactagccctattaatcgcatattaacagaaaagtatggtgatgaagatattgacatagtattccaaaactgtataagctttggccttagtttaatgtcagtagtagaacaatttactaatgtatgtcctaacagaattattctcatacctaagcttaatgagatacatttgatgaaacctcccatattcacaggtgatgttgatattcacaagttaaaacaagtgatacaaaaacagcatatgtttttaccagacaaaataagtttgactcaatatgtggaattattcttaagtaataaaacactcaaatctggatctcatgttaattctaatttaatattggcacataaaatatctgactattttcataatacttacattttaagtactaatttagctggacattggattctgattatacaacttatgaaagattctaaaggtatttttgaaaaagattggggagagggatatataactgatcatatgtttattaatttgaaagttttcttcaatgcttataagacctatctcttgtgttttcataaaggttatggcaaagcaaagctggagtgtgatatgaacacttcagatcttctatgtgtattggaattaatagacagtagttattggaagtctatgtctaaggtatttttagaacaaaaagttatcaaatacattcttagccaagatgcaagtttacatagagtaaaaggatgtcatagcttcaaattatggtttcttaaacgtcttaatgtagcagaattcacagtttgcccttgggttgttaacatagattatcatccaacacatatgaaagcaatattaacttatatagatcttgttagaatgggattgataaatatagatagaatacacattaaaaataaacacaaattcaatgatgaattttatacttctaatctcttctacattaattataacttctcagataatactcatctattaactaaacatataaggattgctaattctgaattagaaaataattacaacaaattatatcatcctacaccagaaaccctagagaatatactagccaatccgattaaaagtaatgacaaaaagacactgaatgactattgtataggtaaaaatgttgactcaataatgttaccattgttatctaataagaagcttattaaatcgtctgcaatgattagaaccaattacagcaaacaagatttgtataatttattccctatggttgtgattgatagaattatagatcattcaggcaatacagccaaatccaaccaactttacactactacttcccaccaaatatctttagtgcacaatagcacatcactttactgcatgcttccttggcatcatattaatagattcaattttgtatttagttctacaggttgtaaaattagtatagagtatattttaaaagatcttaaaattaaagatcccaattgtatagcattcataggtgaaggagcagggaatttattattgcgtacagtagtggaacttcatcctgacataagatatatttacagaagtctgaaagattgcaatgatcatagtttacctattgagtttttaaggctgtacaatggacatatcaacattgattatggtgaaaatttgaccattcctgctacagatgcaaccaacaacattcattggtcttatttacatataaagtttgctgaacctatcagtctttttgtctgtgatgccgaattgtctgtaacagtcaactggagtaaaattataatagaatggagcaagcatgtaagaaagtgcaagtactgttcctcagttaataaatgtatgttaatagtaaaatatcatgctcaagatgatattgatttcaaattagacaatataactatattaaaaacttatgtatgcttaggcagtaagttaaagggatcggaggtttacttagtccttacaataggtcctgcgaatatattcccagtatttaatgtagtacaaaatgctaaattgatactatcaagaaccaaaaatttcatcatgcctaagaaagctgataaagagtctattgatgcaaatattaaaagtttgataccctttctttgttaccctataacaaaaaaaggaattaatactgcattgtcaaaactaaagagtgttgttagtggagatatactatcatattctatagctggacgtaatgaagttttcagcaataaacttataaatcataagcatatgaacatcttaaaatggttcaatcatgttttaaatttcagatcaacagaactaaactataaccatttatatatggtagaatctacatatccttacctaagtgaattgttaaacagcttgacaaccaatgaacttaaaaaactgattaaaatcacaggtagtctgttatacaactttcataatgaataatgaataaagatcttataataaaaattcccatagctatacactaacactgtattcaattatagttattaaaaattaaaaatcgtacgattttttaaataacttttagtgaactaatcctaaagttatcattttaatcttggaggaataaatttaaaccctaatctaattggtttatatgtgtattaactaaattacgagatattagtttttgacactttttttctcgtgggtcggcatggcatctccacctcctcgcggtccgacctgggcatccgaaggaggacgcacgtccactcggatggctaagggagctgctaacaaagcccgaaaggaagctgagttggctgctgccaccgctgagcaataactagcataaccccttggggcctctaaacgggtcttgaggggttttttgctgaaaggaggaactatatacgcgtaagcttctcgacccattctcatgtttgacagcttatcatcgaatttctgccattcatccgcttattatcacttattcaggcgtagcaaccaggcgtttaagggcaccaataactgccttaaaaaaattacgccccgccctgccactcatcgcagtactgttgtaattcattaagcattctgccgacatggaagccatcacagacggcatgatgaacctgaatcgccagcggcatcagcaccttgtcgccttgcgtataatatttgcccatggtgaaaacgggggcgaagaagttgtccatattggccacgtttaaatcaaaactggtgaaactcacccagggattggctgagacgaaaaacatattctcaataaaccctttagggaaataggccaggttttcaccgtaacacgccacatcttgcgaatatatgtgtagaaactgccggaaatcgtcgtggtattcactccagagcgatgaaaacgtttcagtttgctcatggaaaacggtgtaacaagggtgaacactatcccatatcaccagctcaccgtctttcattgccatacggaattccggatgagcattcatcaggcgggcaagaatgtgaataaaggccggataaaacttgtgcttatttttctttacggtctttaaaaaggccgtaatatccagctgaacggtctggttataggtacattgagcaactgactgaaatgcctcaaaatgttctttacgatgccattgggatatatcaacggtggtatatccagtgatttttttctccattttagcttccttagctcctgaaaatctcgataactcaaaaaatacgcccggtagtgatcttatttcattatggtgaaagttggaacctcttacgtgccgatcaacgtctcattttcgccaaaagttggcccagggcttcccggtatcaacagggacaccaggatttatttattctgcgaagtgatcttccgtcacaggtatttattcgcgataagctcatggagcggcgtaaccgtcgcacaggaaggacagagaaagcgcggatctgggaagtgacggacagaacggtcaggacctggattggggaggcggttgccgccgctgctgctgacggtgtgacgttctctgttccggtcacaccacatacgttccgccattcctatgcgatgcacatgctgtatgccggtataccgctgaaagttctgcaaagcctgatgggacataagtccatcagttcaacggaagtctacacgaaggtttttgcgctggatgtggctgcccggcaccgggtgcagtttgcgatgccggagtctgatgcggttgcgatgctgaaacaattatcctgagaataaatgccttggcctttatatggaaatgtggaactgagtggatatgctgtttttgtctgttaaacagagaagctggctgttatccactgagaagcgaacgaaacagtcgggaaaatctcccattatcgtagagatccgcattattaatctcaggagcctgtgtagcgtttataggaagtagtgttctgtcatgatgcctgcaagcggtaacgaaaacgatttgaatatgccttcaggaacaatagaaatcttcgtgcggtgttacgttgaagtggagcggattatgtcagcaatggacagaacaacctaatgaacacagaaccatgatgtggtctgtccttttacagccagtaggctcgccgcagtcgagcgacggcgaagccctcgagtgagcgaggaagcaccagggaacagcacttatatattctgcttacacacgatgcctgaaaaaacttcccttggggttatccacttatccacggggatatttttataattattttttttatagtttttagatcttcttttttagagcgccttgtaggcctttatccatgctggttctagagaaggtgttgtgacaaattgccctttcagtgtgacaaatcaccctcaaatgacagtcctgtctgtgacaaattgcccttaaccctgtgacaaattgccctcagaagaagctgttttttcacaaagttatccctgcttattgactcttttttatttagtgtgacaatctaaaaacttgtcacacttcacatggatctgtcatggcggaaacagcggttatcaatcacaagaaacgtaaaaatagcccgcgaatcgtccagtcaaacgacctcactgaggcggcatatagtctctcccgggatcaaaaacgtatgctgtatctgttcgttgaccagatcagaaaatctgatggcaccctacaggaacatgacggtatctgcgagatccatgttgctaaatatgctgaaatattcggattgacctctgcggaagccagtaaggatatacggcaggcattgaagagtttcgcggggaaggaagtggttttttatcgccctgaagaggatgccggcgatgaaaaaggctatgaatcttttccttggtttatcaaacgtgcgcacagtccatccagagggctttacagtgtacatatcaacccatatctcattcccttctttatcgggttacagaaccggtttacgcagtttcggcttagtgaaacaaaagaaatcaccaatccgtatgccatgcgtttatacgaatccctgtgtcagtatcgtaagccggatggctcaggcatcgtctctctgaaaatcgactggatcatagagcgttaccagctgcctcaaagttaccagcgtatgcctgacttccgccgccgcttcctgcaggtctgtgttaatgagatcaacagcagaactccaatgcgcctctcatacattgagaaaaagaaaggccgccagacgactcatatcgtattttccttccgcgatatcacttccatgacgacaggatagtctgagggttatctgtcacagatttgagggtggttcgtcacatttgttctgacctactgagggtaatttgtcacagttttgctgtttccttcagcctgcatggattttctcatactttttgaactgtaatttttaaggaagccaaatttgagggcagtttgtcacagttgatttccttctctttcccttcgtcatgtgacctgatatcgggggttagttcgtcatcattgatgagggttgattatcacagtttattactctgaattggctatccgcgtgtgtacctctacctggagtttttcccacggtggatatttcttcttgcgctgagcgtaagagctatctgacagaacagttcttctttgcttcctcgccagttcgctcgctatgctcggttacacggctgcggcgagcgctagtgataataagtgactgaggtatgtgctcttcttatctccttttgtagtgttgctcttattttaaacaactttgcggttttttgatgactttgcgattttgttgttgctttgcagtaaattgcaagatttaataaaaaaacgcaaagcaatgattaaaggatgttcagaatgaaactcatggaaacacttaaccagtgcataaacgctggtcatgaaatgacgaaggctatcgccattgcacagtttaatgatgacagcccggaagcgaggaaaataacccggcgctggagaataggtgaagcagcggatttagttggggtttcttctcaggctatcagagatgccgagaaagcagggcgactaccgcacccggatatggaaattcgaggacgggttgagcaacgtgttggttatacaattgaacaaattaatcatatgcgtgatgtgtttggtacgcgattgcgacgtgctgaagacgtatttccaccggtgatcggggttgctgcccataaaggtggcgtttacaaaacctcagtttctgttcatcttgctcaggatctggctctgaaggggctacgtgttttgctcgtggaaggtaacgacccccagggaacagcctcaatgtatcacggatgggtaccagatcttcatattcatgcagaagacactctcctgcctttctatcttggggaaaaggacgatgtcacttatgcaataaagcccacttgctggccggggcttgacattattccttcctgtctggctctgcaccgtattgaaactgagttaatgggcaaatttgatgaaggtaaactgcccaccgatccacacctgatgctccgactggccattgaaactgttgctcatgactatgatgtcatagttattgacagcgcgcctaacctgggtatcggcacgattaatgtcgtatgtgctgctgatgtgctgattgttcccacgcctgctgagttgtttgactacacctccgcactgcagtttttcgatatgcttcgtgatctgctcaagaacgttgatcttaaagggttcgagcctgatgtacgtattttgcttaccaaatacagcaatagtaatggctctcagtccccgtggatggaggagcaaattcgggatgcctggggaagcatggttctaaaaaatgttgtacgtgaaacggatgaagttggtaaaggtcagatccggatgagaactgtttttgaacaggccattgatcaacgctcttcaactggtgcctggagaaatgctctttctatttgggaacctgtctgcaatgaaattttcgatcgtctgattaaaccacgctgggagattagataatgaagcgtgcgcctgttattccaaaacatacgctcaatactcaaccggttgaagatacttcgttatcgacaccagctgccccgatggtggattcgttaattgcgcgcgtaggagtaatggctcgcggtaatgccattactttgcctgtatgtggtcgggatgtgaagtttactcttgaagtgctccggggtgatagtgttgagaagacctctcgggtatggtcaggtaatgaacgtgaccaggagctgcttactgaggacgcactggatgatctcatcccttcttttctactgactggtcaacagacaccggcgttcggtcgaagagtatctggtgtcatagaaattgccgatgggagtcgccgtcgtaaagctgctgcacttaccgaaagtgattatcgtgttctggttggcgagctggatgatgagcagatggctgcattatccagattgggtaacgattatcgcccaacaagtgcttatgaacgtggtcagcgttatgcaagccgattgcagaatgaatttgctggaaatatttctgcgctggctgatgcggaaaatatttcacgtaagattattacccgctgtatcaacaccgccaaattgcctaaatcagttgttgctcttttttctcaccccggtgaactatctgcccggtcaggtgatgcacttcaaaaagcctttacagataaagaggaattacttaagcagcaggcatctaaccttcatgagcagaaaaaagctggggtgatatttgaagctgaagaagttatcactcttttaacttctgtgcttaaaacgtcatctgcatcaagaactagtttaagctcacgacatcagtttgctcctggagcgacagtattgtataagggcgataaaatggtgcttaacctggacaggtctcgtgttccaactgagtgtatagagaaaattgaggccattcttaaggaacttgaaaagccagcaccctgatgcgaccacgttttagtctacgtttatctgtctttacttaatgtcctttgttacaggccagaaagcataactggcctgaatattctctctgggcccactgttccacttgtatcgtcggtctgataatcagactgggaccacggtcccactcgtatcgtcggtctgattattagtctgggaccacggtcccactcgtatcgtcggtctgattattagtctgggaccacggtcccactcgtatcgtcggtctgataatcagactgggaccacggtcccactcgtatcgtcggtctgattattagtctgggaccatggtcccactcgtatcgtcggtctgattattagtctgggaccacggtcccactcgtatcgtcggtctgattattagtctggaaccacggtcccactcgtatcgtcggtctgattattagtctgggaccacggtcccactcgtatcgtcggtctgattattagtctgggaccacgatcccactcgtgttgtcggtctgattatcggtctgggaccacggtcccacttgtattgtcgatcagactatcagcgtgagactacgattccatcaatgcctgtcaagggcaagtattgacatgtcgtcgtaacctgtagaacggagtaacctcggtgtgcggttgtatgcctgctgtggattgctgctgtgtcctgcttatccacaacattttgcgcacggttatgtggacaaaatacctggttacccaggccgtgccggcacgttaaccgggctgcatccgatgcaagtgtgtcgctgtcgagttt

SEQ ID NO: 133 - DNA, 22656 bp, Artificial Sequence
  Description of Artificial Sequence: Synthetic polynucleotide
aaacggatccttcgaaacgaaattaatacgactcactatagggaagtttttcgcgtctgatgaggccgttaggccgaaactcctctccggagtcacgcgaaaaaatgcgtacaacaaacttgcataaaccaaaaaaatggggcaaataagaatttgataagtaccacttaaatttaactcccttgcttagcgatgggttcgaattcgctatcgatgataaaagtacgtctacaaaatctatttgataatgatgaagtagcgctactaaaaataacgtgttatacggataaactaatacatctaacgaatgcgctagcgaaagcggtaatacatacgataaaactaaatggtatagtatttgtacatgtaataacgtcgtcggatatatgtccgaataataatatagtagtaaaatcgaattttacgacgatgccggtactacaaaatggtggttatatatgggaaatgatggaactaacgcattgttcgcaaccgaatggtctactagatgataattgtgaaataaaattttcgaaaaaactatcggattcgacgatgacgaattatatgaatcaactatcggaactactaggttttgatctaaatccgtaaattataattaatatcaactagcaaatcaatgtcactaacaccattagttaatataaaacttaacagaagacaaaaatggggcaaataaatcaattcagccaacccaaccatggatacgacgcataatgataatacgccgcaacgtctaatgataacggatatgcgtccgctatcgctagaaacgataataacgtcgctaacgcgtgatataataacgcataaatttatatatctaataaatcatgaatgtatagtacgtaaactagatgaacgtcaagcgacgtttacgtttctagtaaattatgaaatgaaactactacataaagtaggttcgacgaaatataaaaaatatacggaatataatacgaaatatggtacgtttccgatgccgatatttataaatcatgatggttttctagaatgtataggtataaaaccgacgaaacatacgccgataatatataaatatgatctaaatccgtaaatttcaacacaatattcacacaatctaaaacaacaactctatgcataactatactccatagtccagatggagcctgaaaattatagtaatttaaaattaaggagagatataagatagaagatggggcaaatacaaagatggctcttagcaaagtcaagttgaatgatacactcaacaaagatcaacttctgtcatccagcaaatacaccatccaacggagcacaggagatagtattgatactcctaattatgatgtgcagaaacacatcaataagttatgtggcatgttattaatcacagaagatgctaatcataaattcactgggttaataggtatgttatatgcgatgtctaggttaggaagagaagacaccataaaaatactcagagatgcgggatatcatgtaaaagcaaatggagtagatgtaacaacacatcgtcaagacattaatggaaaagaaatgaaatttgaagtgttaacattggcaagcttaacaactgaaattcaaatcaacattgagatagaatctagaaaatcctacaaaaaaatgctaaaagaaatgggagaggtagctccagaatacaggcatgactctcctgattgtgggatgataatattatgtatagcagcattagtaataactaaattagcagcaggggacagatctggtcttacagccgtgattaggagagctaataatgtcctaaaaaatgaaatgaaacgttacaaaggcttactacccaaggacatagccaacagcttctatgaagtgtttgaaaaacatccccactttatagatgtttttgttcattttggtatagcacaatcttctaccagaggtggcagtagagttgaagggatttttgcaggattgtttatgaatgcctatggtgcagggcaagtgatgttacggtggggagtcttagcaaaatcagttaaaaatattatgttaggacatgctagtgtgcaagcagaaatggaacaagttgttgaggtttatgaatatgcccaaaaattgggtggtgaagcaggattctaccatatattgaacaacccaaaagcatcattattatctttgactcaatttcctcacttctccagtgtagtattaggcaatgctgctggcctaggcataatgggagagtacagaggtacaccgaggaatcaagatctatatgatgcagcaaaggcatatgctgaacaactcaaagaaaatggtgtgattaactacagtgtactagacttgacagcagaagaactagaggctatcaaacatcagcttaatccaaaagataatgatgtagagctttgagttaataaaaaatggggcaaataaatcatcatggaaaagtttgctcctgaattccatggagaagatgcaaacaacagggctactaaattcctagaatcaataaagggcaaattcacatcacccaaagatcccaagaaaaaagatagtatcatatctgtcaactcaatagatatagaagtaaccaaagaaagccctataacatcaaattcaactattatcaacccaacaaatgagacagatgatactgcagggaacaagcccaattatcaaagaaaacctctagtaagtttcaaagaagaccctacaccaagtgataatcccttttctaaactatacaaagaaaccatagaaacatttgataacaatgaagaagaatccagctattcatacgaagaaataaatgatcagacaaacgataatataacagcaagattagataggattgatgaaaaattaagtgaaatactaggaatgcttcacacattagtagtggcaagtgcaggacctacatctgctcgggatggtataagagatgccatgattggtttaagagaagaaatgatagaaaaaatcagaactgaagcattaatgaccaatgacagattagaagctatggcaagactcaggaatgaggaaagtgaaaagatggcaaaagacacatcagatgaagtgtctctcaatccaacatcagagaaattgaacaacctattggaagggaatgatagtgacaatgatctatcacttgaagatttctgattagttaccactcttcacatcaacacacaataccaacagaagaccaacaaactaaccaacccaatcatccaaccaaacatccatccgccaatcagccaaacagccaacaaaacaaccagccaatccaaaactaaccacccggaaaaaatctataatatagttacaaaaaaaggaaagggtggggcaaatatggaaacatacgtgaacaagcttcacgaaggctccacatacacagctgctgttcaatacaatgtcttagaaaaagacgatgaccctgcatcacttacaatatgggtgcccatgttccaatcatctatgccagcagatttacttataaaagaactagctaatgtcaacatactagtgaaacaaatatccacacccaagggaccttcactaagagtcatgataaactcaagaagtgcagtgctagcacaaatgcccagcaaatttaccatatgcgctaatgtgtccttggatgaaagaagcaaactagcatatgatgtaaccacaccctgtgaaatcaaggcatgtagtctaacatgcctaaaatcaaaaaatatgttgactacagttaaagatctcactatgaagacactcaaccctacacatgatattattgctttatgtgaatttgaaaacatagtaacatcaaaaaaagtcataataccaacatacctaagatccatcagtgtcagaaataaagatctgaacacacttgaaaatataacaaccactgaattcaaaaatgctatcacaaatgcaaaaatcatcccttactcaggattactattagtcatcacagtgactgacaacaaaggagcattcaaatacataaagccacaaagtcaattcatagtagatcttggagcttacctagaaaaagaaagtatatattatgttaccacaaattggaagcacacagctacacgatttgcaatcaaacccatggaagattaacctttttcctctacatcagtgtgttaattcatacaaactttctacctacattcttcacttcaccatcacaatcacaaacactctgtggttcaaccaatcaaacaaaacttatctgaagtcccagatcatcccaagtcattgtttatcagatctagtactcaaataagttaataaaaaatatacacatggacgtccatggggcaaatgcaaacatgtttgtttttcttgttttattgccactagtctctagtcagtgtgttaatcttacaaccagaactcaattaccccctgcatacactaattctttcacacgtggtgtttattaccctgacaaagttttcagatcctcagttttacattcaactcaggacttgttcttacctttcttttccaatgttacttggttccatgctatacatgtctctgggaccaatggtactaagaggtttgataaccctgtcctaccatttaatgatggtgtttattttgcttccactgagaagtctaacataataagaggctggatttttggtactactttagattcgaagacccagtccctacttattgttaataacgctactaatgttgttattaaagtctgtgaatttcaattttgtaatgatccatttttgggtgtttattaccacaaaaacaacaaaagttggatggaaagtgagttcagagtttattctagtgcgaataattgcacttttgaatatgtctctcagccttttcttatggaccttgaaggaaaacagggtaatttcaaaaatcttagggaatttgtgtttaagaatattgatggttattttaaaatatattctaagcacacgcctattaatttagtgcgtgatctccctcagggtttttcggctttagaaccattggtagatttgccaataggtattaacatcactaggtttcaaactttacttgctttacatagaagttatttgactcctggtgattcttcttcaggttggacagctggtgctgcagcttattatgtgggttatcttcaacctaggacttttctattaaaatataatgaaaatggaaccattacagatgctgtagactgtgcacttgaccctctctcagaaacaaagtgtacgttgaaatccttcactgtagaaaaaggaatctatcaaacttctaactttagagtccaaccaacagaatctattgttagatttcctaatattacaaacttgtgcccttttggtgaagtttttaacgccaccagatttgcatctgtttatgcttggaacaggaagagaatcagcaactgtgttgctgattattctgtcctatataattccgcatcattttccacttttaagtgttatggagtgtctcctactaaattaaatgatctctgctttactaatgtctatgcagattcatttgtaattagaggtgatgaagtcagacaaatcgctccagggcaaactggaaagattgctgattataattataaattaccagatgattttacaggctgcgttatagcttggaattctaacaatcttgattctaaggttggtggtaattataattacctgtatagattgtttaggaagtctaatctcaaaccttttgagagagatatttcaactgaaatctatcaggccggtagcacaccttgtaatggtgttgaaggttttaattgttactttcctttacaatcatatggtttccaacccactaatggtgttggttaccaaccatacagagtagtagtactttcttttgaacttctacatgcaccagcaactgtttgtggacctaaaaagtctactaatttggttaaaaacaaatgtgtcaatttcaacttcaatggtttaacaggcacaggtgttcttactgagtctaacaaaaagtttctgcctttccaacaatttggcagagacattgctgacactactgatgctgtccgtgatccacagacacttgagattcttgacattacaccatgttcttttggtggtgtcagtgttataacaccaggaacaaatacttctaaccaggttgctgttctttatcaggatgttaactgcacagaagtccctgttgctattcatgcagatcaacttactcctacttggcgtgtttattctacaggttctaatgtttttcaaacacgtgcaggctgtttaataggggctgaacatgtcaacaactcatatgagtgtgacatacccattggtgcaggtatatgcgctagttatcagactcagactaattctcctcggcgggcacgtagtgtagctagtcaatccatcattgcctacactatgtcacttggtgcagaaaattcagttgcttactctaataactctattgccatacccacaaattttactattagtgttaccacagaaattctaccagtgtctatgaccaagacatcagtagattgtacaatgtacatttgtggtgattcaactgaatgcagcaatcttttgttgcaatatggcagtttttgtacacaattaaaccgtgctttaactggaatagctgttgaacaagacaaaaacacccaagaagtttttgcacaagtcaaacaaatttacaaaacaccaccaattaaagattttggtggttttaatttttcacaaatattaccagatccatcaaaaccaagcaagaggtcatttattgaagatctacttttcaacaaagtgacacttgcagatgctggcttcatcaaacaatatggtgattgccttggtgatattgctgctagagacctcatttgtgcacaaaagtttaacggccttactgttttgccacctttgctcacagatgaaatgattgctcaatacacttctgcactgttagcgggtacaatcacttctggttggacctttggtgcaggtgctgcattacaaataccatttgctatgcaaatggcttataggtttaatggtattggagttacacagaatgttctctatgagaaccaaaaattgattgccaaccaatttaatagtgctattggcaaaattcaagactcactttcttccacagcaagtgcacttggaaaacttcaagatgtggtcaaccaaaatgcacaagctttaaacacgcttgttaaacaacttagctccaattttggtgcaatttcaagtgttttaaatgatatcctttcacgtcttgacaaagttgaggctgaagtgcaaattgataggttgatcacaggcagacttcaaagtttgcagacatatgtgactcaacaattaattagagctgcagaaatcagagcttctgctaatcttgctgctactaaaatgtcagagtgtgtacttggacaatcaaaaagagttgatttttgtggaaagggctatcatcttatgtccttccctcagtcagcacctcatggtgtagtcttcttgcatgtgacttatgtccctgcacaagaaaagaacttcacaactgctcctgccatttgtcatgatggaaaagcacactttcctcgtgaaggtgtctttgtttcaaatggcacacactggtttgtaacacaaaggaatttttatgaaccacaaatcattactacagacaacacatttgtgtctggtaactgtgatgttgtaataggaattgtcaacaacacagtttatgatcctttgcaacctgaattagactcattcaaggaggagttagataaatattttaagaatcatacatcaccagatgttgatttaggtgacatctctggcattaatgcttcagttgtaaacattcaaaaagaaattgaccgcctcaatgaggttgccaagaatttaaatgaatctctcatcgatctccaagaacttggaaagtatgagcagtatataaaatggccatggtacatttggctaggttttatagctggcttgattgccatagtaatggtgacaattatgctttgctgtatgaccagttgctgtagttgtctcaagggctgttgttcttgtggatcctgctgcaaatttgatgaagacgacggactgctcctatactgtaaggccagaagcacaccaatcacactaagcaaggatcaactgagtggtataaataatattgcatttagtaactaaataaaaatagcacctaatcatgttcttacaatggtttactatctgctcatagacaacccatctatcattggattttcttaaaatctgaacttcatcgaaactcttatctataaaccatctcacttacactatttaagtagattcctagtttatagttatataaaacacaattgaatgccagtcgaccttaccatctgtaaaaatgaaaactggggcaaatatgtcacgaaggaatccttgcaaatttgaaattcgaggtcattgcttaaatggtaagaggtgtcattttagtcataattattttgaatggccaccccatgcactgcttgtaagacaaaactttatgttaaacagaatacttaagtctatggataaaagtatagataccttatcagaaataagtggagctgcagagttggacagaacagaagagtatgctcttggtgtagttggagtgctagagagttatataggatcaataaacaatataactaaacaatcagcatgtgttgccatgagcaaactcctcactgaactcaatagtgatgatatcaaaaagctgagggacaatgaagagctaaattcacccaagataagagtgtacaatactgtcatatcatatattgaaagcaacaggaaaaacaataaacaaactatccatctgttaaaaagattgccagcagacgtattgaagaaaaccatcaaaaacacattggatatccataagagcataaccatcaacaacccaaaagaatcaactgttagtgatacaaatgaccatgccaaaaataatgatactacctgacaaatatccttgtagtataacttccatactaataacaagtagatgtagagttactatgtataatcaaaagaacacactatatttcaatcaaaacaacccaaataaccatatgtactcaccgaatcaaacattcaatgaaatccattggacctctcaagaattgattgacacaattcaaaattttctacaacatctaggtattattgaggatatatatacaatatatatattagtgtcataacactcaattctaacactcaccacatcgttacattattaattcaaacaattcaagttgtgggacaaaatggatcccattattaatggaaattctgctaatgtttatctaaccgatagttatttaaaaggtgttatctctttctcagagtgtaatgctttaggaagttacatattcaatggtccttatctcaaaaatgattataccaacttaattagtagacaaaatccattaatagaacacatgaatctaaagaaactaaatataacacagtccttaatatctaagtatcataaaggtgaaataaaattagaagaacctacttattttcagtcattacttatgacatacaagagtatgacctcgtcagaacagattgctaccactaatttacttaaaaagataataagaagagctatagaaataagtgatgtcaaagtctatgctatattgaataaactagggcttaaagaaaaggacaagattaaatccaacaatggacaagatgaagacaactcagttattacgaccataatcaaagatgatatactttcagctgttaaagataatcaatctcatcttaaagcagacaaaaatcactctacaaaacaaaaagacacaatcaaaacaacactcttgaagaaattgatgtgttcaatgcaacatcctccatcatggttaatacattggtttaacttatacacaaaattaaacaacatattaacacagtatcgatcaaatgaggtaaaaaaccatgggtttacattgatagataatcaaactcttagtggatttcaatttattttgaaccaatatggttgtatagtttatcataaggaactcaaaagaattactgtgacaacctataatcaattcttgacatggaaagatattagccttagtagattaaatgtttgtttaattacatggattagtaactgcttgaacacattaaataaaagcttaggcttaagatgcggattcaataatgttatcttgacacaactattcctttatggagattgtatactaaagctatttcacaatgaggggttctacataataaaagaggtagagggatttattatgtctctaattttaaatataacagaagaagatcaattcagaaaacgattttataatagtatgctcaacaacatcacagatgctgctaataaagctcagaaaaatctgctatcaagagtatgtcatacattattagataagacagtgtccgataatataataaatggcagatggataattctattaagtaagttccttaaattaattaagcttgcaggtgacaataaccttaacaatctgagtgaactatattttttgttcagaatatttggacacccaatggtagatgaaagacaagccatggatgctgttaaaattaattgcaatgagaccaaattttacttgttaagcagtctgagtatgttaagaggtgcctttatatatagaattataaaagggtttgtaaataattacaacagatggcctactttaagaaatgctattgttttacccttaagatggttaacttactataaactaaacacttatccttctttgttggaacttacagaaagagatttgattgtgttatcaggactacgtttctatcgtgagtttcggttgcctaaaaaagtggatcttgaaatgattataaatgataaagctatatcacctcctaaaaatttgatatggactagtttccctagaaattacatgccatcacacatacaaaactatatagaacatgaaaaattaaaattttccgagagtgataaatcaagaagagtattagagtattatttaagagataacaaattcaatgaatgtgatttatacaactgtgtagttaatcaaagttatctcaacaaccctaatcatgtggtatcattgacaggcaaagaaagagaactcagtgtaggtagaatgtttgcaatgcaaccgggaatgttcagacaggttcaaatattggcagagaaaatgatagctgaaaacattttacaattctttcctgaaagtcttacaagatatggtgatctagaactacaaaaaatattagaattgaaagcaggaataagtaacaaatcaaatcgctacaatgataattacaacaattacattagtaagtgctctatcatcacagatctcagcaaattcaatcaagcatttcgatatgaaacgtcatgtatttgtagtgatgtgctggatgaactgcatggtgtacaatctctattttcctggttacatttaactattcctcatgtcacaataatatgcacatataggcatgcacccccctatataggagatcatattgtagatcttaacaatgtagatgaacaaagtggattatatagatatcacatgggtggcatcgaagggtggtgtcaaaaactgtggaccatagaagctatatcactattggatctaatatctctcaaagggaaattctcaattactgctttaattaatggtgacaatcaatcaatagatataagcaaaccaatcagactcatggaaggtcaaactcatgctcaagcagattatttgctagcattaaatagccttaaattactgtataaagagtatgcaggcataggccacaaattaaaaggaactgagacttatatatcacgagatatgcaatttatgagtaaaacaattcaacataacggtgtatattacccagctagtataaagaaagtcctaagagtgggaccgtggataaacactatacttgatgatttcaaagtgagtctagaatctataggtagtttgacacaagaattagaatatagaggtgaaagtctattatgcagtttaatatttagaaatgtatggttatataatcagattgctctacaattaaaaaatcatgcattatgtaacaataaactatatttggacatattaaaggttctgaaacacttaaaaaccttttttaatcttgataatattgatacagcattaacattgtatatgaatttacccatgttatttggtggtggtgatcccaacttgttatatcgaagtttctatagaagaactcctgacttcctcacagaggctatagttcactctgtgttcatacttagttattatacaaaccatgacttaaaagataaacttcaagatctgtcagatgatagattgaataagttcttaacatgcataatcacgtttgacaaaaaccctaatgctgaattcgtaacattgatgagagatcctcaagctttagggtctgagagacaagctaaaattactagcgaaatcaatagactggcagttacagaggttttgagtacagctccaaacaaaatattctccaaaagtgcacaacattatactactacagagatagatctaaatgatattatgcaaaatatagaacctacatatcctcatgggctaagagttgtttatgaaagtttacccttttataaagcagagaaaatagtaaatcttatatcaggtacaaaatctataactaacatactggaaaaaacttctgccatagacttaacagatattgatagagccactgagatgatgaggaaaaacataactttgcttataaggatacttccattggattgtaacagagataaaagagagatattgagtatggaaaacctaagtattactgaattaagcaaatatgttagggaaagatcttggtctttatccaatatagttggtgttacatcacccagtatcatgtatacaatggacatcaaatatactacaagcactatatctagtggcataattatagagaaatataatgttaacagtttaacacgtggtgagagaggacccactaaaccatgggttggttcatctacacaagagaaaaaaacaatgccagtttataatagacaagtcttaaccaaaaaacagagagatcaaatagatctattagcaaaattggattgggtgtatgcatctatagataacaaggatgaattcatggaagaactcagcataggaacccttgggttaacatatgaaaaggccaagaaattatttccacaatatttaagtgtcaattatttgcatcgccttacagtcagtagtagaccatgtgaattccctgcatcaataccagcttatagaacaacaaattatcactttgacactagccctattaatcgcatattaacagaaaagtatggtgatgaagatattgacatagtattccaaaactgtataagctttggccttagtttaatgtcagtagtagaacaatttactaatgtatgtcctaacagaattattctcatacctaagcttaatgagatacatttgatgaaacctcccatattcacaggtgatgttgatattcacaagttaaaacaagtgatacaaaaacagcatatgtttttaccagacaaaataagtttgactcaatatgtggaattattcttaagtaataaaacactcaaatctggatctcatgttaattctaatttaatattggcacataaaatatctgactattttcataatacttacattttaagtactaatttagctggacattggattctgattatacaacttatgaaagattctaaaggtatttttgaaaaagattggggagagggatatataactgatcatatgtttattaatttgaaagttttcttcaatgcttataagacctatctcttgtgttttcataaaggttatggcaaagcaaagctggagtgtgatatgaacacttcagatcttctatgtgtattggaattaatagacagtagttattggaagtctatgtctaaggtatttttagaacaaaaagttatcaaatacattcttagccaagatgcaagtttacatagagtaaaaggatgtcatagcttcaaattatggtttcttaaacgtcttaatgtagcagaattcacagtttgcccttgggttgttaacatagattatcatccaacacatatgaaagcaatattaacttatatagatcttgttagaatgggattgataaatatagatagaatacacattaaaaataaacacaaattcaatgatgaattttatacttctaatctcttctacattaattataacttctcagataatactcatctattaactaaacatataaggattgctaattctgaattagaaaataattacaacaaattatatcatcctacaccagaaaccctagagaatatactagccaatccgattaaaagtaatgacaaaaagacactgaatgactattgtataggtaaaaatgttgactcaataatgttaccattgttatctaataagaagcttattaaatcgtctgcaatgattagaaccaattacagcaaacaagatttgtataatttattccctatggttgtgattgatagaattatagatcattcaggcaatacagccaaatccaaccaactttacactactacttcccaccaaatatctttagtgcacaatagcacatcactttactgcatgcttccttggcatcatattaatagattcaattttgtatttagttctacaggttgtaaaattagtatagagtatattttaaaagatcttaaaattaaagatcccaattgtatagcattcataggtgaaggagcagggaatttattattgcgtacagtagtggaacttcatcctgacataagatatatttacagaagtctgaaagattgcaatgatcatagtttacctattgagtttttaaggctgtacaatggacatatcaacattgattatggtgaaaatttgaccattcctgctacagatgcaaccaacaacattcattggtcttatttacatataaagtttgctgaacctatcagtctttttgtctgtgatgccgaattgtctgtaacagtcaactggagtaaaattataatagaatggagcaagcatgtaagaaagtgcaagtactgttcctcagttaataaatgtatgttaatagtaaaatatcatgctcaagatgatattgatttcaaattagacaatataactatattaaaaacttatgtatgcttaggcagtaagttaaagggatcggaggtttacttagtccttacaataggtcctgcgaatatattcccagtatttaatgtagtacaaaatgctaaattgatactatcaagaaccaaaaatttcatcatgcctaagaaagctgataaagagtctattgatgcaaatattaaaagtttgataccctttctttgttaccctataacaaaaaaaggaattaatactgcattgtcaaaactaaagagtgttgttagtggagatatactatcatattctatagctggacgtaatgaagttttcagcaataaacttataaatcataagcatatgaacatcttaaaatggttcaatcatgttttaaatttcagatcaacagaactaaactataaccatttatatatggtagaatctacatatccttacctaagtgaattgttaaacagcttgacaaccaatgaacttaaaaaactgattaaaatcacaggtagtctgttatacaactttcataatgaataatgaataaagatcttataataaaaattcccatagctatacactaacactgtattcaattatagttattaaaaattaaaaatcgtacgattttttaaataacttttagtgaactaatcctaaagttatcattttaatcttggaggaataaatttaaaccctaatctaattggtttatatgtgtattaactaaattacgagatattagtttttgacactttttttctcgtgggtcggcatggcatctccacctcctcgcggtccgacctgggcatccgaaggaggacgcacgtccactcggatggctaagggagctgctaacaaagcccgaaaggaagctgagttggctgctgccaccgctgagcaataactagcataaccccttggggcctctaaacgggtcttgaggggttttttgctgaaaggaggaactatatacgcgtaagcttctcgacccattctcatgtttgacagcttatcatcgaatttctgccattcatccgcttattatcacttattcaggcgtagcaaccaggcgtttaagggcaccaataactgccttaaaaaaattacgccccgccctgccactcatcgcagtactgttgtaattcattaagcattctgccgacatggaagccatcacagacggcatgatgaacctgaatcgccagcggcatcagcaccttgtcgccttgcgtataatatttgcccatggtgaaaacgggggcgaagaagttgtccatattggccacgtttaaatcaaaactggtgaaactcacccagggattggctgagacgaaaaacatattctcaataaaccctttagggaaataggccaggttttcaccgtaacacgccacatcttgcgaatatatgtgtagaaactgccggaaatcgtcgtggtattcactccagagcgatgaaaacgtttcagtttgctcatggaaaacggtgtaacaagggtgaacactatcccatatcaccagctcaccgtctttcattgccatacggaattccggatgagcattcatcaggcgggcaagaatgtgaataaaggccggataaaacttgtgcttatttttctttacggtctttaaaaaggccgtaatatccagctgaacggtctggttataggtacattgagcaactgactgaaatgcctcaaaatgttctttacgatgccattgggatatatcaacggtggtatatccagtgatttttttctccattttagcttccttagctcctgaaaatctcgataactcaaaaaatacgcccggtagtgatcttatttcattatggtgaaagttggaacctcttacgtgccgatcaacgtctcattttcgccaaaagttggcccagggcttcccggtatcaacagggacaccaggatttatttattctgcgaagtgatcttccgtcacaggtatttattcgcgataagctcatggagcggcgtaaccgtcgcacaggaaggacagagaaagcgcggatctgggaagtgacggacagaacggtcaggacctggattggggaggcggttgccgccgctgctgctgacggtgtgacgttctctgttccggtcacaccacatacgttccgccattcctatgcgatgcacatgctgtatgccggtataccgctgaaagttctgcaaagcctgatgggacataagtccatcagttcaacggaagtctacacgaaggtttttgcgctggatgtggctgcccggcaccgggtgcagtttgcgatgccggagtctgatgcggttgcgatgctgaaacaattatcctgagaataaatgccttggcctttatatggaaatgtggaactgagtggatatgctgtttttgtctgttaaacagagaagctggctgttatccactgagaagcgaacgaaacagtcgggaaaatctcccattatcgtagagatccgcattattaatctcaggagcctgtgtagcgtttataggaagtagtgttctgtcatgatgcctgcaagcggtaacgaaaacgatttgaatatgccttcaggaacaatagaaatcttcgtgcggtgttacgttgaagtggagcggattatgtcagcaatggacagaacaacctaatgaacacagaaccatgatgtggtctgtccttttacagccagtaggctcgccgcagtcgagcgacggcgaagccctcgagtgagcgaggaagcaccagggaacagcacttatatattctgcttacacacgatgcctgaaaaaacttcccttggggttatccacttatccacggggatatttttataattattttttttatagtttttagatcttcttttttagagcgccttgtaggcctttatccatgctggttctagagaaggtgttgtgacaaattgccctttcagtgtgacaaatcaccctcaaatgacagtcctgtctgtgacaaattgcccttaaccctgtgacaaattgccctcagaagaagctgttttttcacaaagttatccctgcttattgactcttttttatttagtgtgacaatctaaaaacttgtcacacttcacatggatctgtcatggcggaaacagcggttatcaatcacaagaaacgtaaaaatagcccgcgaatcgtccagtcaaacgacctcactgaggcggcatatagtctctcccgggatcaaaaacgtatgctgtatctgttcgttgaccagatcagaaaatctgatggcaccctacaggaacatgacggtatctgcgagatccatgttgctaaatatgctgaaatattcggattgacctctgcggaagccagtaaggatatacggcaggcattgaagagtttcgcggggaaggaagtggttttttatcgccctgaagaggatgccggcgatgaaaaaggctatgaatcttttccttggtttatcaaacgtgcgcacagtccatccagagggctttacagtgtacatatcaacccatatctcattcccttctttatcgggttacagaaccggtttacgcagtttcggcttagtgaaacaaaagaaatcaccaatccgtatgccatgcgtttatacgaatccctgtgtcagtatcgtaagccggatggctcaggcatcgtctctctgaaaatcgactggatcatagagcgttaccagctgcctcaaagttaccagcgtatgcctgacttccgccgccgcttcctgcaggtctgtgttaatgagatcaacagcagaactccaatgcgcctctcatacattgagaaaaagaaaggccgccagacgactcatatcgtattttccttccgcgatatcacttccatgacgacaggatagtctgagggttatctgtcacagatttgagggtggttcgtcacatttgttctgacctactgagggtaatttgtcacagttttgctgtttccttcagcctgcatggattttctcatactttttgaactgtaatttttaaggaagccaaatttgagggcagtttgtcacagttgatttccttctctttcccttcgtcatgtgacctgatatcgggggttagttcgtcatcattgatgagggttgattatcacagtttattactctgaattggctatccgcgtgtgtacctctacctggagtttttcccacggtggatatttcttcttgcgctgagcgtaagagctatctgacagaacagttcttctttgcttcctcgccagttcgctcgctatgctcggttacacggctgcggcgagcgctagtgataataagtgactgaggtatgtgctcttcttatctccttttgtagtgttgctcttattttaaacaactttgcggttttttgatgactttgcgattttgttgttgctttgcagtaaattgcaagatttaataaaaaaacgcaaagcaatgattaaaggatgttcagaatgaaactcatggaaacacttaaccagtgcataaacgctggtcatgaaatgacgaaggctatcgccattgcacagtttaatgatgacagcccggaagcgaggaaaataacccggcgctggagaataggtgaagcagcggatttagttggggtttcttctcaggctatcagagatgccgagaaagcagggcgactaccgcacccggatatggaaattcgaggacgggttgagcaacgtgttggttatacaattgaacaaattaatcatatgcgtgatgtgtttggtacgcgattgcgacgtgctgaagacgtatttccaccggtgatcggggttgctgcccataaaggtggcgtttacaaaacctcagtttctgttcatcttgctcaggatctggctctgaaggggctacgtgttttgctcgtggaaggtaacgacccccagggaacagcctcaatgtatcacggatgggtaccagatcttcatattcatgcagaagacactctcctgcctttctatcttggggaaaaggacgatgtcacttatgcaataaagcccacttgctggccggggcttgacattattccttcctgtctggctctgcaccgtattgaaactgagttaatgggcaaatttgatgaaggtaaactgcccaccgatccacacctgatgctccgactggccattgaaactgttgctcatgactatgatgtcatagttattgacagcgcgcctaacctgggtatcggcacgattaatgtcgtatgtgctgctgatgtgctgattgttcccacgcctgctgagttgtttgactacacctccgcactgcagtttttcgatatgcttcgtgatctgctcaagaacgttgatcttaaagggttcgagcctgatgtacgtattttgcttaccaaatacagcaatagtaatggctctcagtccccgtggatggaggagcaaattcgggatgcctggggaagcatggttctaaaaaatgttgtacgtgaaacggatgaagttggtaaaggtcagatccggatgagaactgtttttgaacaggccattgatcaacgctcttcaactggtgcctggagaaatgctctttctatttgggaacctgtctgcaatgaaattttcgatcgtctgattaaaccacgctgggagattagataatgaagcgtgcgcctgttattccaaaacatacgctcaatactcaaccggttgaagatacttcgttatcgacaccagctgccccgatggtggattcgttaattgcgcgcgtaggagtaatggctcgcggtaatgccattactttgcctgtatgtggtcgggatgtgaagtttactcttgaagtgctccggggtgatagtgttgagaagacctctcgggtatggtcaggtaatgaacgtgaccaggagctgcttactgaggacgcactggatgatctcatcccttcttttctactgactggtcaacagacaccggcgttcggtcgaagagtatctggtgtcatagaaattgccgatgggagtcgccgtcgtaaagctgctgcacttaccgaaagtgattatcgtgttctggttggcgagctggatgatgagcagatggctgcattatccagattgggtaacgattatcgcccaacaagtgcttatgaacgtggtcagcgttatgcaagccgattgcagaatgaatttgctggaaatatttctgcgctggctgatgcggaaaatatttcacgtaagattattacccgctgtatcaacaccgccaaattgcctaaatcagttgttgctcttttttctcaccccggtgaactatctgcccggtcaggtgatgcacttcaaaaagcctttacagataaagaggaattacttaagcagcaggcatctaaccttcatgagcagaaaaaagctggggtgatatttgaagctgaagaagttatcactcttttaacttctgtgcttaaaacgtcatctgcatcaagaactagtttaagctcacgacatcagtttgctcctggagcgacagtattgtataagggcgataaaatggtgcttaacctggacaggtctcgtgttccaactgagtgtatagagaaaattgaggccattcttaaggaacttgaaaagccagcaccctgatgcgaccacgttttagtctacgtttatctgtctttacttaatgtcctttgttacaggccagaaagcataactggcctgaatattctctctgggcccactgttccacttgtatcgtcggtctgataatcagactgggaccacggtcccactcgtatcgtcggtctgattattagtctgggaccacggtcccactcgtatcgtcggtctgattattagtctgggaccacggtcccactcgtatcgtcggtctgataatcagactgggaccacggtcccactcgtatcgtcggtctgattattagtctgggaccatggtcccactcgtatcgtcggtctgattattagtctgggaccacggtcccactcgtatcgtcggtctgattattagtctggaaccacggtcccactcgtatcgtcggtctgattattagtctgggaccacggtcccactcgtatcgtcggtctgattattagtctgggaccacgatcccactcgtgttgtcggtctgattatcggtctgggaccacggtcccacttgtattgtcgatcagactatcagcgtgagactacgattccatcaatgcctgtcaagggcaagtattgacatgtcgtcgtaacctgtagaacggagtaacctcggtgtgcggttgtatgcctgctgtggattgctgctgtgtcctgcttatccacaacattttgcgcacggttatgtggacaaaatacctggttacccaggccgtgccggcacgttaaccgggctgcatccgatgcaagtgtgtcgctgtcgagttt

SEQ ID NO: 134 - DNA, 22611 bp, Artificial Sequence
  Description of Artificial Sequence: Synthetic polynucleotide
aaacggatccttcgaaacgaaattaatacgactcactatagggaagtttttcgcgtctgatgaggccgttaggccgaaactcctctccggagtcacgcgaaaaaatgcgtacaacaaacttgcataaaccaaaaaaatggggcaaataagaatttgataagtaccacttaaatttaactcccttgcttagcgatgggttcgaattcgctatcgatgataaaagtacgtctacaaaatctatttgataatgatgaagtagcgctactaaaaataacgtgttatacggataaactaatacatctaacgaatgcgctagcgaaagcggtaatacatacgataaaactaaatggtatagtatttgtacatgtaataacgtcgtcggatatatgtccgaataataatatagtagtaaaatcgaattttacgacgatgccggtactacaaaatggtggttatatatgggaaatgatggaactaacgcattgttcgcaaccgaatggtctactagatgataattgtgaaataaaattttcgaaaaaactatcggattcgacgatgacgaattatatgaatcaactatcggaactactaggttttgatctaaatccgtaaattataattaatatcaactagcaaatcaatgtcactaacaccattagttaatataaaacttaacagaagacaaaaatggggcaaataaatcaattcagccaacccaaccatggatacgacgcataatgataatacgccgcaacgtctaatgataacggatatgcgtccgctatcgctagaaacgataataacgtcgctaacgcgtgatataataacgcataaatttatatatctaataaatcatgaatgtatagtacgtaaactagatgaacgtcaagcgacgtttacgtttctagtaaattatgaaatgaaactactacataaagtaggttcgacgaaatataaaaaatatacggaatataatacgaaatatggtacgtttccgatgccgatatttataaatcatgatggttttctagaatgtataggtataaaaccgacgaaacatacgccgataatatataaatatgatctaaatccgtaaatttcaacacaatattcacacaatctaaaacaacaactctatgcataactatactccatagtccagatggagcctgaaaattatagtaatttaaaattaaggagagatataagatagaagatggggcaaatacaaagatggctcttagcaaagtcaagttgaatgatacactcaacaaagatcaacttctgtcatccagcaaatacaccatccaacggagcacaggagatagtattgatactcctaattatgatgtgcagaaacacatcaataagttatgtggcatgttattaatcacagaagatgctaatcataaattcactgggttaataggtatgttatatgcgatgtctaggttaggaagagaagacaccataaaaatactcagagatgcgggatatcatgtaaaagcaaatggagtagatgtaacaacacatcgtcaagacattaatggaaaagaaatgaaatttgaagtgttaacattggcaagcttaacaactgaaattcaaatcaacattgagatagaatctagaaaatcctacaaaaaaatgctaaaagaaatgggagaggtagctccagaatacaggcatgactctcctgattgtgggatgataatattatgtatagcagcattagtaataactaaattagcagcaggggacagatctggtcttacagccgtgattaggagagctaataatgtcctaaaaaatgaaatgaaacgttacaaaggcttactacccaaggacatagccaacagcttctatgaagtgtttgaaaaacatccccactttatagatgtttttgttcattttggtatagcacaatcttctaccagaggtggcagtagagttgaagggatttttgcaggattgtttatgaatgcctatggtgcagggcaagtgatgttacggtggggagtcttagcaaaatcagttaaaaatattatgttaggacatgctagtgtgcaagcagaaatggaacaagttgttgaggtttatgaatatgcccaaaaattgggtggtgaagcaggattctaccatatattgaacaacccaaaagcatcattattatctttgactcaatttcctcacttctccagtgtagtattaggcaatgctgctggcctaggcataatgggagagtacagaggtacaccgaggaatcaagatctatatgatgcagcaaaggcatatgctgaacaactcaaagaaaatggtgtgattaactacagtgtactagacttgacagcagaagaactagaggctatcaaacatcagcttaatccaaaagataatgatgtagagctttgagttaataaaaaatggggcaaataaatcatcatggaaaagtttgctcctgaattccatggagaagatgcaaacaacagggctactaaattcctagaatcaataaagggcaaattcacatcacccaaagatcccaagaaaaaagatagtatcatatctgtcaactcaatagatatagaagtaaccaaagaaagccctataacatcaaattcaactattatcaacccaacaaatgagacagatgatactgcagggaacaagcccaattatcaaagaaaacctctagtaagtttcaaagaagaccctacaccaagtgataatcccttttctaaactatacaaagaaaccatagaaacatttgataacaatgaagaagaatccagctattcatacgaagaaataaatgatcagacaaacgataatataacagcaagattagataggattgatgaaaaattaagtgaaatactaggaatgcttcacacattagtagtggcaagtgcaggacctacatctgctcgggatggtataagagatgccatgattggtttaagagaagaaatgatagaaaaaatcagaactgaagcattaatgaccaatgacagattagaagctatggcaagactcaggaatgaggaaagtgaaaagatggcaaaagacacatcagatgaagtgtctctcaatccaacatcagagaaattgaacaacctattggaagggaatgatagtgacaatgatctatcacttgaagatttctgattagttaccactcttcacatcaacacacaataccaacagaagaccaacaaactaaccaacccaatcatccaaccaaacatccatccgccaatcagccaaacagccaacaaaacaaccagccaatccaaaactaaccacccggaaaaaatctataatatagttacaaaaaaaggaaagggtggggcaaatatggaaacatacgtgaacaagcttcacgaaggctccacatacacagctgctgttcaatacaatgtcttagaaaaagacgatgaccctgcatcacttacaatatgggtgcccatgttccaatcatctatgccagcagatttacttataaaagaactagctaatgtcaacatactagtgaaacaaatatccacacccaagggaccttcactaagagtcatgataaactcaagaagtgcagtgctagcacaaatgcccagcaaatttaccatatgcgctaatgtgtccttggatgaaagaagcaaactagcatatgatgtaaccacaccctgtgaaatcaaggcatgtagtctaacatgcctaaaatcaaaaaatatgttgactacagttaaagatctcactatgaagacactcaaccctacacatgatattattgctttatgtgaatttgaaaacatagtaacatcaaaaaaagtcataataccaacatacctaagatccatcagtgtcagaaataaagatctgaacacacttgaaaatataacaaccactgaattcaaaaatgctatcacaaatgcaaaaatcatcccttactcaggattactattagtcatcacagtgactgacaacaaaggagcattcaaatacataaagccacaaagtcaattcatagtagatcttggagcttacctagaaaaagaaagtatatattatgttaccacaaattggaagcacacagctacacgatttgcaatcaaacccatggaagattaacctttttcctctacatcagtgtgttaattcatacaaactttctacctacattcttcacttcaccatcacaatcacaaacactctgtggttcaaccaatcaaacaaaacttatctgaagtcccagatcatcccaagtcattgtttatcagatctagtactcaaataagttaataaaaaatatacacatggacgtccatggggcaaatgcaaacatgtttgtttttcttgttttattgccactagtctctagtcagtgtgttaatcttacaaccagaactcaattaccccctgcatacactaattctttcacacgtggtgtttattaccctgacaaagttttcagatcctcagttttacattcaactcaggacttgttcttacctttcttttccaatgttacttggttccatgctatacatgtctctgggaccaatggtactaagaggtttgataaccctgtcctaccatttaatgatggtgtttattttgcttccactgagaagtctaacataataagaggctggatttttggtactactttagattcgaagacccagtccctacttattgttaataacgctactaatgttgttattaaagtctgtgaatttcaattttgtaatgatccatttttgggtgtttattaccacaaaaacaacaaaagttggatggaaagtgagttcagagtttattctagtgcgaataattgcacttttgaatatgtctctcagccttttcttatggaccttgaaggaaaacagggtaatttcaaaaatcttagggaatttgtgtttaagaatattgatggttattttaaaatatattctaagcacacgcctattaatttagtgcgtgatctccctcagggtttttcggctttagaaccattggtagatttgccaataggtattaacatcactaggtttcaaactttacttgctttacatagaagttatttgactcctggtgattcttcttcaggttggacagctggtgctgcagcttattatgtgggttatcttcaacctaggacttttctattaaaatataatgaaaatggaaccattacagatgctgtagactgtgcacttgaccctctctcagaaacaaagtgtacgttgaaatccttcactgtagaaaaaggaatctatcaaacttctaactttagagtccaaccaacagaatctattgttagatttcctaatattacaaacttgtgcccttttggtgaagtttttaacgccaccagatttgcatctgtttatgcttggaacaggaagagaatcagcaactgtgttgctgattattctgtcctatataattccgcatcattttccacttttaagtgttatggagtgtctcctactaaattaaatgatctctgctttactaatgtctatgcagattcatttgtaattagaggtgatgaagtcagacaaatcgctccagggcaaactggaaagattgctgattataattataaattaccagatgattttacaggctgcgttatagcttggaattctaacaatcttgattctaaggttggtggtaattataattacctgtatagattgtttaggaagtctaatctcaaaccttttgagagagatatttcaactgaaatctatcaggccggtagcacaccttgtaatggtgttgaaggttttaattgttactttcctttacaatcatatggtttccaacccactaatggtgttggttaccaaccatacagagtagtagtactttcttttgaacttctacatgcaccagcaactgtttgtggacctaaaaagtctactaatttggttaaaaacaaatgtgtcaatttcaacttcaatggtttaacaggcacaggtgttcttactgagtctaacaaaaagtttctgcctttccaacaatttggcagagacattgctgacactactgatgctgtccgtgatccacagacacttgagattcttgacattacaccatgttcttttggtggtgtcagtgttataacaccaggaacaaatacttctaaccaggttgctgttctttatcaggatgttaactgcacagaagtccctgttgctattcatgcagatcaacttactcctacttggcgtgtttattctacaggttctaatgtttttcaaacacgtgcaggctgtttaataggggctgaacatgtcaacaactcatatgagtgtgacatacccattggtgcaggtatatgcgctagttatcagactcagactaattctcctcggcgggcacgtagtgtagctagtcaatccatcattgcctacactatgtcacttggtgcagaaaattcagttgcttactctaataactctattgccatacccacaaattttactattagtgttaccacagaaattctaccagtgtctatgaccaagacatcagtagattgtacaatgtacatttgtggtgattcaactgaatgcagcaatcttttgttgcaatatggcagtttttgtacacaattaaaccgtgctttaactggaatagctgttgaacaagacaaaaacacccaagaagtttttgcacaagtcaaacaaatttacaaaacaccaccaattaaagattttggtggttttaatttttcacaaatattaccagatccatcaaaaccaagcaagaggtcatttattgaagatctacttttcaacaaagtgacacttgcagatgctggcttcatcaaacaatatggtgattgccttggtgatattgctgctagagacctcatttgtgcacaaaagtttaacggccttactgttttgccacctttgctcacagatgaaatgattgctcaatacacttctgcactgttagcgggtacaatcacttctggttggacctttggtgcaggtgctgcattacaaataccatttgctatgcaaatggcttataggtttaatggtattggagttacacagaatgttctctatgagaaccaaaaattgattgccaaccaatttaatagtgctattggcaaaattcaagactcactttcttccacagcaagtgcacttggaaaacttcaagatgtggtcaaccaaaatgcacaagctttaaacacgcttgttaaacaacttagctccaattttggtgcaatttcaagtgttttaaatgatatcctttcacgtcttgacaaagttgaggctgaagtgcaaattgataggttgatcacaggcagacttcaaagtttgcagacatatgtgactcaacaattaattagagctgcagaaatcagagcttctgctaatcttgctgctactaaaatgtcagagtgtgtacttggacaatcaaaaagagttgatttttgtggaaagggctatcatcttatgtccttccctcagtcagcacctcatggtgtagtcttcttgcatgtgacttatgtccctgcacaagaaaagaacttcacaactgctcctgccatttgtcatgatggaaaagcacactttcctcgtgaaggtgtctttgtttcaaatggcacacactggtttgtaacacaaaggaatttttatgaaccacaaatcattactacagacaacacatttgtgtctggtaactgtgatgttgtaataggaattgtcaacaacacagtttatgatcctttgcaacctgaattagactcattcaaggaggagttagataaatattttaagaatcatacatcaccagatgttgatttaggtgacatctctggcattaatgcttcagttgtaaacattcaaaaagaaattgaccgcctcaatgaggttgccaagaatttaaatgaatctctcatcgatctccaagaacttggaaagtatgagcagtatataaaatggccatggtacatttggctaggttttatagctggcttgattgccatagtaatggtgacaattatgctttgctgtatgaccagttgctgtagttgtctcaagggactgctcctatactgtaaggccagaagcacaccaatcacactaagcaaggatcaactgagtggtataaataatattgcatttagtaactaaataaaaatagcacctaatcatgttcttacaatggtttactatctgctcatagacaacccatctatcattggattttcttaaaatctgaacttcatcgaaactcttatctataaaccatctcacttacactatttaagtagattcctagtttatagttatataaaacacaattgaatgccagtcgaccttaccatctgtaaaaatgaaaactggggcaaatatgtcacgaaggaatccttgcaaatttgaaattcgaggtcattgcttaaatggtaagaggtgtcattttagtcataattattttgaatggccaccccatgcactgcttgtaagacaaaactttatgttaaacagaatacttaagtctatggataaaagtatagataccttatcagaaataagtggagctgcagagttggacagaacagaagagtatgctcttggtgtagttggagtgctagagagttatataggatcaataaacaatataactaaacaatcagcatgtgttgccatgagcaaactcctcactgaactcaatagtgatgatatcaaaaagctgagggacaatgaagagctaaattcacccaagataagagtgtacaatactgtcatatcatatattgaaagcaacaggaaaaacaataaacaaactatccatctgttaaaaagattgccagcagacgtattgaagaaaaccatcaaaaacacattggatatccataagagcataaccatcaacaacccaaaagaatcaactgttagtgatacaaatgaccatgccaaaaataatgatactacctgacaaatatccttgtagtataacttccatactaataacaagtagatgtagagttactatgtataatcaaaagaacacactatatttcaatcaaaacaacccaaataaccatatgtactcaccgaatcaaacattcaatgaaatccattggacctctcaagaattgattgacacaattcaaaattttctacaacatctaggtattattgaggatatatatacaatatatatattagtgtcataacactcaattctaacactcaccacatcgttacattattaattcaaacaattcaagttgtgggacaaaatggatcccattattaatggaaattctgctaatgtttatctaaccgatagttatttaaaaggtgttatctctttctcagagtgtaatgctttaggaagttacatattcaatggtccttatctcaaaaatgattataccaacttaattagtagacaaaatccattaatagaacacatgaatctaaagaaactaaatataacacagtccttaatatctaagtatcataaaggtgaaataaaattagaagaacctacttattttcagtcattacttatgacatacaagagtatgacctcgtcagaacagattgctaccactaatttacttaaaaagataataagaagagctatagaaataagtgatgtcaaagtctatgctatattgaataaactagggcttaaagaaaaggacaagattaaatccaacaatggacaagatgaagacaactcagttattacgaccataatcaaagatgatatactttcagctgttaaagataatcaatctcatcttaaagcagacaaaaatcactctacaaaacaaaaagacacaatcaaaacaacactcttgaagaaattgatgtgttcaatgcaacatcctccatcatggttaatacattggtttaacttatacacaaaattaaacaacatattaacacagtatcgatcaaatgaggtaaaaaaccatgggtttacattgatagataatcaaactcttagtggatttcaatttattttgaaccaatatggttgtatagtttatcataaggaactcaaaagaattactgtgacaacctataatcaattcttgacatggaaagatattagccttagtagattaaatgtttgtttaattacatggattagtaactgcttgaacacattaaataaaagcttaggcttaagatgcggattcaataatgttatcttgacacaactattcctttatggagattgtatactaaagctatttcacaatgaggggttctacataataaaagaggtagagggatttattatgtctctaattttaaatataacagaagaagatcaattcagaaaacgattttataatagtatgctcaacaacatcacagatgctgctaataaagctcagaaaaatctgctatcaagagtatgtcatacattattagataagacagtgtccgataatataataaatggcagatggataattctattaagtaagttccttaaattaattaagcttgcaggtgacaataaccttaacaatctgagtgaactatattttttgttcagaatatttggacacccaatggtagatgaaagacaagccatggatgctgttaaaattaattgcaatgagaccaaattttacttgttaagcagtctgagtatgttaagaggtgcctttatatatagaattataaaagggtttgtaaataattacaacagatggcctactttaagaaatgctattgttttacccttaagatggttaacttactataaactaaacacttatccttctttgttggaacttacagaaagagatttgattgtgttatcaggactacgtttctatcgtgagtttcggttgcctaaaaaagtggatcttgaaatgattataaatgataaagctatatcacctcctaaaaatttgatatggactagtttccctagaaattacatgccatcacacatacaaaactatatagaacatgaaaaattaaaattttccgagagtgataaatcaagaagagtattagagtattatttaagagataacaaattcaatgaatgtgatttatacaactgtgtagttaatcaaagttatctcaacaaccctaatcatgtggtatcattgacaggcaaagaaagagaactcagtgtaggtagaatgtttgcaatgcaaccgggaatgttcagacaggttcaaatattggcagagaaaatgatagctgaaaacattttacaattctttcctgaaagtcttacaagatatggtgatctagaactacaaaaaatattagaattgaaagcaggaataagtaacaaatcaaatcgctacaatgataattacaacaattacattagtaagtgctctatcatcacagatctcagcaaattcaatcaagcatttcgatatgaaacgtcatgtatttgtagtgatgtgctggatgaactgcatggtgtacaatctctattttcctggttacatttaactattcctcatgtcacaataatatgcacatataggcatgcacccccctatataggagatcatattgtagatcttaacaatgtagatgaacaaagtggattatatagatatcacatgggtggcatcgaagggtggtgtcaaaaactgtggaccatagaagctatatcactattggatctaatatctctcaaagggaaattctcaattactgctttaattaatggtgacaatcaatcaatagatataagcaaaccaatcagactcatggaaggtcaaactcatgctcaagcagattatttgctagcattaaatagccttaaattactgtataaagagtatgcaggcataggccacaaattaaaaggaactgagacttatatatcacgagatatgcaatttatgagtaaaacaattcaacataacggtgtatattacccagctagtataaagaaagtcctaagagtgggaccgtggataaacactatacttgatgatttcaaagtgagtctagaatctataggtagtttgacacaagaattagaatatagaggtgaaagtctattatgcagtttaatatttagaaatgtatggttatataatcagattgctctacaattaaaaaatcatgcattatgtaacaataaactatatttggacatattaaaggttctgaaacacttaaaaaccttttttaatcttgataatattgatacagcattaacattgtatatgaatttacccatgttatttggtggtggtgatcccaacttgttatatcgaagtttctatagaagaactcctgacttcctcacagaggctatagttcactctgtgttcatacttagttattatacaaaccatgacttaaaagataaacttcaagatctgtcagatgatagattgaataagttcttaacatgcataatcacgtttgacaaaaaccctaatgctgaattcgtaacattgatgagagatcctcaagctttagggtctgagagacaagctaaaattactagcgaaatcaatagactggcagttacagaggttttgagtacagctccaaacaaaatattctccaaaagtgcacaacattatactactacagagatagatctaaatgatattatgcaaaatatagaacctacatatcctcatgggctaagagttgtttatgaaagtttacccttttataaagcagagaaaatagtaaatcttatatcaggtacaaaatctataactaacatactggaaaaaacttctgccatagacttaacagatattgatagagccactgagatgatgaggaaaaacataactttgcttataaggatacttccattggattgtaacagagataaaagagagatattgagtatggaaaacctaagtattactgaattaagcaaatatgttagggaaagatcttggtctttatccaatatagttggtgttacatcacccagtatcatgtatacaatggacatcaaatatactacaagcactatatctagtggcataattatagagaaatataatgttaacagtttaacacgtggtgagagaggacccactaaaccatgggttggttcatctacacaagagaaaaaaacaatgccagtttataatagacaagtcttaaccaaaaaacagagagatcaaatagatctattagcaaaattggattgggtgtatgcatctatagataacaaggatgaattcatggaagaactcagcataggaacccttgggttaacatatgaaaaggccaagaaattatttccacaatatttaagtgtcaattatttgcatcgccttacagtcagtagtagaccatgtgaattccctgcatcaataccagcttatagaacaacaaattatcactttgacactagccctattaatcgcatattaacagaaaagtatggtgatgaagatattgacatagtattccaaaactgtataagctttggccttagtttaatgtcagtagtagaacaatttactaatgtatgtcctaacagaattattctcatacctaagcttaatgagatacatttgatgaaacctcccatattcacaggtgatgttgatattcacaagttaaaacaagtgatacaaaaacagcatatgtttttaccagacaaaataagtttgactcaatatgtggaattattcttaagtaataaaacactcaaatctggatctcatgttaattctaatttaatattggcacataaaatatctgactattttcataatacttacattttaagtactaatttagctggacattggattctgattatacaacttatgaaagattctaaaggtatttttgaaaaagattggggagagggatatataactgatcatatgtttattaatttgaaagttttcttcaatgcttataagacctatctcttgtgttttcataaaggttatggcaaagcaaagctggagtgtgatatgaacacttcagatcttctatgtgtattggaattaatagacagtagttattggaagtctatgtctaaggtatttttagaacaaaaagttatcaaatacattcttagccaagatgcaagtttacatagagtaaaaggatgtcatagcttcaaattatggtttcttaaacgtcttaatgtagcagaattcacagtttgcccttgggttgttaacatagattatcatccaacacatatgaaagcaatattaacttatatagatcttgttagaatgggattgataaatatagatagaatacacattaaaaataaacacaaattcaatgatgaattttatacttctaatctcttctacattaattataacttctcagataatactcatctattaactaaacatataaggattgctaattctgaattagaaaataattacaacaaattatatcatcctacaccagaaaccctagagaatatactagccaatccgattaaaagtaatgacaaaaagacactgaatgactattgtataggtaaaaatgttgactcaataatgttaccattgttatctaataagaagcttattaaatcgtctgcaatgattagaaccaattacagcaaacaagatttgtataatttattccctatggttgtgattgatagaattatagatcattcaggcaatacagccaaatccaaccaactttacactactacttcccaccaaatatctttagtgcacaatagcacatcactttactgcatgcttccttggcatcatattaatagattcaattttgtatttagttctacaggttgtaaaattagtatagagtatattttaaaagatcttaaaattaaagatcccaattgtatagcattcataggtgaaggagcagggaatttattattgcgtacagtagtggaacttcatcctgacataagatatatttacagaagtctgaaagattgcaatgatcatagtttacctattgagtttttaaggctgtacaatggacatatcaacattgattatggtgaaaatttgaccattcctgctacagatgcaaccaacaacattcattggtcttatttacatataaagtttgctgaacctatcagtctttttgtctgtgatgccgaattgtctgtaacagtcaactggagtaaaattataatagaatggagcaagcatgtaagaaagtgcaagtactgttcctcagttaataaatgtatgttaatagtaaaatatcatgctcaagatgatattgatttcaaattagacaatataactatattaaaaacttatgtatgcttaggcagtaagttaaagggatcggaggtttacttagtccttacaataggtcctgcgaatatattcccagtatttaatgtagtacaaaatgctaaattgatactatcaagaaccaaaaatttcatcatgcctaagaaagctgataaagagtctattgatgcaaatattaaaagtttgataccctttctttgttaccctataacaaaaaaaggaattaatactgcattgtcaaaactaaagagtgttgttagtggagatatactatcatattctatagctggacgtaatgaagttttcagcaataaacttataaatcataagcatatgaacatcttaaaatggttcaatcatgttttaaatttcagatcaacagaactaaactataaccatttatatatggtagaatctacatatccttacctaagtgaattgttaaacagcttgacaaccaatgaacttaaaaaactgattaaaatcacaggtagtctgttatacaactttcataatgaataatgaataaagatcttataataaaaattcccatagctatacactaacactgtattcaattatagttattaaaaattaaaaatcgtacgattttttaaataacttttagtgaactaatcctaaagttatcattttaatcttggaggaataaatttaaaccctaatctaattggtttatatgtgtattaactaaattacgagatattagtttttgacactttttttctcgtgggtcggcatggcatctccacctcctcgcggtccgacctgggcatccgaaggaggacgcacgtccactcggatggctaagggagctgctaacaaagcccgaaaggaagctgagttggctgctgccaccgctgagcaataactagcataaccccttggggcctctaaacgggtcttgaggggttttttgctgaaaggaggaactatatacgcgtaagcttctcgacccattctcatgtttgacagcttatcatcgaatttctgccattcatccgcttattatcacttattcaggcgtagcaaccaggcgtttaagggcaccaataactgccttaaaaaaattacgccccgccctgccactcatcgcagtactgttgtaattcattaagcattctgccgacatggaagccatcacagacggcatgatgaacctgaatcgccagcggcatcagcaccttgtcgccttgcgtataatatttgcccatggtgaaaacgggggcgaagaagttgtccatattggccacgtttaaatcaaaactggtgaaactcacccagggattggctgagacgaaaaacatattctcaataaaccctttagggaaataggccaggttttcaccgtaacacgccacatcttgcgaatatatgtgtagaaactgccggaaatcgtcgtggtattcactccagagcgatgaaaacgtttcagtttgctcatggaaaacggtgtaacaagggtgaacactatcccatatcaccagctcaccgtctttcattgccatacggaattccggatgagcattcatcaggcgggcaagaatgtgaataaaggccggataaaacttgtgcttatttttctttacggtctttaaaaaggccgtaatatccagctgaacggtctggttataggtacattgagcaactgactgaaatgcctcaaaatgttctttacgatgccattgggatatatcaacggtggtatatccagtgatttttttctccattttagcttccttagctcctgaaaatctcgataactcaaaaaatacgcccggtagtgatcttatttcattatggtgaaagttggaacctcttacgtgccgatcaacgtctcattttcgccaaaagttggcccagggcttcccggtatcaacagggacaccaggatttatttattctgcgaagtgatcttccgtcacaggtatttattcgcgataagctcatggagcggcgtaaccgtcgcacaggaaggacagagaaagcgcggatctgggaagtgacggacagaacggtcaggacctggattggggaggcggttgccgccgctgctgctgacggtgtgacgttctctgttccggtcacaccacatacgttccgccattcctatgcgatgcacatgctgtatgccggtataccgctgaaagttctgcaaagcctgatgggacataagtccatcagttcaacggaagtctacacgaaggtttttgcgctggatgtggctgcccggcaccgggtgcagtttgcgatgccggagtctgatgcggttgcgatgctgaaacaattatcctgagaataaatgccttggcctttatatggaaatgtggaactgagtggatatgctgtttttgtctgttaaacagagaagctggctgttatccactgagaagcgaacgaaacagtcgggaaaatctcccattatcgtagagatccgcattattaatctcaggagcctgtgtagcgtttataggaagtagtgttctgtcatgatgcctgcaagcggtaacgaaaacgatttgaatatgccttcaggaacaatagaaatcttcgtgcggtgttacgttgaagtggagcggattatgtcagcaatggacagaacaacctaatgaacacagaaccatgatgtggtctgtccttttacagccagtaggctcgccgcagtcgagcgacggcgaagccctcgagtgagcgaggaagcaccagggaacagcacttatatattctgcttacacacgatgcctgaaaaaacttcccttggggttatccacttatccacggggatatttttataattattttttttatagtttttagatcttcttttttagagcgccttgtaggcctttatccatgctggttctagagaaggtgttgtgacaaattgccctttcagtgtgacaaatcaccctcaaatgacagtcctgtctgtgacaaattgcccttaaccctgtgacaaattgccctcagaagaagctgttttttcacaaagttatccctgcttattgactcttttttatttagtgtgacaatctaaaaacttgtcacacttcacatggatctgtcatggcggaaacagcggttatcaatcacaagaaacgtaaaaatagcccgcgaatcgtccagtcaaacgacctcactgaggcggcatatagtctctcccgggatcaaaaacgtatgctgtatctgttcgttgaccagatcagaaaatctgatggcaccctacaggaacatgacggtatctgcgagatccatgttgctaaatatgctgaaatattcggattgacctctgcggaagccagtaaggatatacggcaggcattgaagagtttcgcggggaaggaagtggttttttatcgccctgaagaggatgccggcgatgaaaaaggctatgaatcttttccttggtttatcaaacgtgcgcacagtccatccagagggctttacagtgtacatatcaacccatatctcattcccttctttatcgggttacagaaccggtttacgcagtttcggcttagtgaaacaaaagaaatcaccaatccgtatgccatgcgtttatacgaatccctgtgtcagtatcgtaagccggatggctcaggcatcgtctctctgaaaatcgactggatcatagagcgttaccagctgcctcaaagttaccagcgtatgcctgacttccgccgccgcttcctgcaggtctgtgttaatgagatcaacagcagaactccaatgcgcctctcatacattgagaaaaagaaaggccgccagacgactcatatcgtattttccttccgcgatatcacttccatgacgacaggatagtctgagggttatctgtcacagatttgagggtggttcgtcacatttgttctgacctactgagggtaatttgtcacagttttgctgtttccttcagcctgcatggattttctcatactttttgaactgtaatttttaaggaagccaaatttgagggcagtttgtcacagttgatttccttctctttcccttcgtcatgtgacctgatatcgggggttagttcgtcatcattgatgagggttgattatcacagtttattactctgaattggctatccgcgtgtgtacctctacctggagtttttcccacggtggatatttcttcttgcgctgagcgtaagagctatctgacagaacagttcttctttgcttcctcgccagttcgctcgctatgctcggttacacggctgcggcgagcgctagtgataataagtgactgaggtatgtgctcttcttatctccttttgtagtgttgctcttattttaaacaactttgcggttttttgatgactttgcgattttgttgttgctttgcagtaaattgcaagatttaataaaaaaacgcaaagcaatgattaaaggatgttcagaatgaaactcatggaaacacttaaccagtgcataaacgctggtcatgaaatgacgaaggctatcgccattgcacagtttaatgatgacagcccggaagcgaggaaaataacccggcgctggagaataggtgaagcagcggatttagttggggtttcttctcaggctatcagagatgccgagaaagcagggcgactaccgcacccggatatggaaattcgaggacgggttgagcaacgtgttggttatacaattgaacaaattaatcatatgcgtgatgtgtttggtacgcgattgcgacgtgctgaagacgtatttccaccggtgatcggggttgctgcccataaaggtggcgtttacaaaacctcagtttctgttcatcttgctcaggatctggctctgaaggggctacgtgttttgctcgtggaaggtaacgacccccagggaacagcctcaatgtatcacggatgggtaccagatcttcatattcatgcagaagacactctcctgcctttctatcttggggaaaaggacgatgtcacttatgcaataaagcccacttgctggccggggcttgacattattccttcctgtctggctctgcaccgtattgaaactgagttaatgggcaaatttgatgaaggtaaactgcccaccgatccacacctgatgctccgactggccattgaaactgttgctcatgactatgatgtcatagttattgacagcgcgcctaacctgggtatcggcacgattaatgtcgtatgtgctgctgatgtgctgattgttcccacgcctgctgagttgtttgactacacctccgcactgcagtttttcgatatgcttcgtgatctgctcaagaacgttgatcttaaagggttcgagcctgatgtacgtattttgcttaccaaatacagcaatagtaatggctctcagtccccgtggatggaggagcaaattcgggatgcctggggaagcatggttctaaaaaatgttgtacgtgaaacggatgaagttggtaaaggtcagatccggatgagaactgtttttgaacaggccattgatcaacgctcttcaactggtgcctggagaaatgctctttctatttgggaacctgtctgcaatgaaattttcgatcgtctgattaaaccacgctgggagattagataatgaagcgtgcgcctgttattccaaaacatacgctcaatactcaaccggttgaagatacttcgttatcgacaccagctgccccgatggtggattcgttaattgcgcgcgtaggagtaatggctcgcggtaatgccattactttgcctgtatgtggtcgggatgtgaagtttactcttgaagtgctccggggtgatagtgttgagaagacctctcgggtatggtcaggtaatgaacgtgaccaggagctgcttactgaggacgcactggatgatctcatcccttcttttctactgactggtcaacagacaccggcgttcggtcgaagagtatctggtgtcatagaaattgccgatgggagtcgccgtcgtaaagctgctgcacttaccgaaagtgattatcgtgttctggttggcgagctggatgatgagcagatggctgcattatccagattgggtaacgattatcgcccaacaagtgcttatgaacgtggtcagcgttatgcaagccgattgcagaatgaatttgctggaaatatttctgcgctggctgatgcggaaaatatttcacgtaagattattacccgctgtatcaacaccgccaaattgcctaaatcagttgttgctcttttttctcaccccggtgaactatctgcccggtcaggtgatgcacttcaaaaagcctttacagataaagaggaattacttaagcagcaggcatctaaccttcatgagcagaaaaaagctggggtgatatttgaagctgaagaagttatcactcttttaacttctgtgcttaaaacgtcatctgcatcaagaactagtttaagctcacgacatcagtttgctcctggagcgacagtattgtataagggcgataaaatggtgcttaacctggacaggtctcgtgttccaactgagtgtatagagaaaattgaggccattcttaaggaacttgaaaagccagcaccctgatgcgaccacgttttagtctacgtttatctgtctttacttaatgtcctttgttacaggccagaaagcataactggcctgaatattctctctgggcccactgttccacttgtatcgtcggtctgataatcagactgggaccacggtcccactcgtatcgtcggtctgattattagtctgggaccacggtcccactcgtatcgtcggtctgattattagtctgggaccacggtcccactcgtatcgtcggtctgataatcagactgggaccacggtcccactcgtatcgtcggtctgattattagtctgggaccatggtcccactcgtatcgtcggtctgattattagtctgggaccacggtcccactcgtatcgtcggtctgattattagtctggaaccacggtcccactcgtatcgtcggtctgattattagtctgggaccacggtcccactcgtatcgtcggtctgattattagtctgggaccacgatcccactcgtgttgtcggtctgattatcggtctgggaccacggtcccacttgtattgtcgatcagactatcagcgtgagactacgattccatcaatgcctgtcaagggcaagtattgacatgtcgtcgtaacctgtagaacggagtaacctcggtgtgcggttgtatgcctgctgtggattgctgctgtgtcctgcttatccacaacattttgcgcacggttatgtggacaaaatacctggttacccaggccgtgccggcacgttaaccgggctgcatccgatgcaagtgtgtcgctgtcgagttt

SEQ ID NO: 135 - DNA, 22590 bp, Artificial Sequence
  Description of Artificial Sequence: Synthetic polynucleotide
aaacggatccttcgaaacgaaattaatacgactcactatagggaagtttttcgcgtctgatgaggccgttaggccgaaactcctctccggagtcacgcgaaaaaatgcgtacaacaaacttgcataaaccaaaaaaatggggcaaataagaatttgataagtaccacttaaatttaactcccttgcttagcgatgggttcgaattcgctatcgatgataaaagtacgtctacaaaatctatttgataatgatgaagtagcgctactaaaaataacgtgttatacggataaactaatacatctaacgaatgcgctagcgaaagcggtaatacatacgataaaactaaatggtatagtatttgtacatgtaataacgtcgtcggatatatgtccgaataataatatagtagtaaaatcgaattttacgacgatgccggtactacaaaatggtggttatatatgggaaatgatggaactaacgcattgttcgcaaccgaatggtctactagatgataattgtgaaataaaattttcgaaaaaactatcggattcgacgatgacgaattatatgaatcaactatcggaactactaggttttgatctaaatccgtaaattataattaatatcaactagcaaatcaatgtcactaacaccattagttaatataaaacttaacagaagacaaaaatggggcaaataaatcaattcagccaacccaaccatggatacgacgcataatgataatacgccgcaacgtctaatgataacggatatgcgtccgctatcgctagaaacgataataacgtcgctaacgcgtgatataataacgcataaatttatatatctaataaatcatgaatgtatagtacgtaaactagatgaacgtcaagcgacgtttacgtttctagtaaattatgaaatgaaactactacataaagtaggttcgacgaaatataaaaaatatacggaatataatacgaaatatggtacgtttccgatgccgatatttataaatcatgatggttttctagaatgtataggtataaaaccgacgaaacatacgccgataatatataaatatgatctaaatccgtaaatttcaacacaatattcacacaatctaaaacaacaactctatgcataactatactccatagtccagatggagcctgaaaattatagtaatttaaaattaaggagagatataagatagaagatggggcaaatacaaagatggctcttagcaaagtcaagttgaatgatacactcaacaaagatcaacttctgtcatccagcaaatacaccatccaacggagcacaggagatagtattgatactcctaattatgatgtgcagaaacacatcaataagttatgtggcatgttattaatcacagaagatgctaatcataaattcactgggttaataggtatgttatatgcgatgtctaggttaggaagagaagacaccataaaaatactcagagatgcgggatatcatgtaaaagcaaatggagtagatgtaacaacacatcgtcaagacattaatggaaaagaaatgaaatttgaagtgttaacattggcaagcttaacaactgaaattcaaatcaacattgagatagaatctagaaaatcctacaaaaaaatgctaaaagaaatgggagaggtagctccagaatacaggcatgactctcctgattgtgggatgataatattatgtatagcagcattagtaataactaaattagcagcaggggacagatctggtcttacagccgtgattaggagagctaataatgtcctaaaaaatgaaatgaaacgttacaaaggcttactacccaaggacatagccaacagcttctatgaagtgtttgaaaaacatccccactttatagatgtttttgttcattttggtatagcacaatcttctaccagaggtggcagtagagttgaagggatttttgcaggattgtttatgaatgcctatggtgcagggcaagtgatgttacggtggggagtcttagcaaaatcagttaaaaatattatgttaggacatgctagtgtgcaagcagaaatggaacaagttgttgaggtttatgaatatgcccaaaaattgggtggtgaagcaggattctaccatatattgaacaacccaaaagcatcattattatctttgactcaatttcctcacttctccagtgtagtattaggcaatgctgctggcctaggcataatgggagagtacagaggtacaccgaggaatcaagatctatatgatgcagcaaaggcatatgctgaacaactcaaagaaaatggtgtgattaactacagtgtactagacttgacagcagaagaactagaggctatcaaacatcagcttaatccaaaagataatgatgtagagctttgagttaataaaaaatggggcaaataaatcatcatggaaaagtttgctcctgaattccatggagaagatgcaaacaacagggctactaaattcctagaatcaataaagggcaaattcacatcacccaaagatcccaagaaaaaagatagtatcatatctgtcaactcaatagatatagaagtaaccaaagaaagccctataacatcaaattcaactattatcaacccaacaaatgagacagatgatactgcagggaacaagcccaattatcaaagaaaacctctagtaagtttcaaagaagaccctacaccaagtgataatcccttttctaaactatacaaagaaaccatagaaacatttgataacaatgaagaagaatccagctattcatacgaagaaataaatgatcagacaaacgataatataacagcaagattagataggattgatgaaaaattaagtgaaatactaggaatgcttcacacattagtagtggcaagtgcaggacctacatctgctcgggatggtataagagatgccatgattggtttaagagaagaaatgatagaaaaaatcagaactgaagcattaatgaccaatgacagattagaagctatggcaagactcaggaatgaggaaagtgaaaagatggcaaaagacacatcagatgaagtgtctctcaatccaacatcagagaaattgaacaacctattggaagggaatgatagtgacaatgatctatcacttgaagatttctgattagttaccactcttcacatcaacacacaataccaacagaagaccaacaaactaaccaacccaatcatccaaccaaacatccatccgccaatcagccaaacagccaacaaaacaaccagccaatccaaaactaaccacccggaaaaaatctataatatagttacaaaaaaaggaaagggtggggcaaatatggaaacatacgtgaacaagcttcacgaaggctccacatacacagctgctgttcaatacaatgtcttagaaaaagacgatgaccctgcatcacttacaatatgggtgcccatgttccaatcatctatgccagcagatttacttataaaagaactagctaatgtcaacatactagtgaaacaaatatccacacccaagggaccttcactaagagtcatgataaactcaagaagtgcagtgctagcacaaatgcccagcaaatttaccatatgcgctaatgtgtccttggatgaaagaagcaaactagcatatgatgtaaccacaccctgtgaaatcaaggcatgtagtctaacatgcctaaaatcaaaaaatatgttgactacagttaaagatctcactatgaagacactcaaccctacacatgatattattgctttatgtgaatttgaaaacatagtaacatcaaaaaaagtcataataccaacatacctaagatccatcagtgtcagaaataaagatctgaacacacttgaaaatataacaaccactgaattcaaaaatgctatcacaaatgcaaaaatcatcccttactcaggattactattagtcatcacagtgactgacaacaaaggagcattcaaatacataaagccacaaagtcaattcatagtagatcttggagcttacctagaaaaagaaagtatatattatgttaccacaaattggaagcacacagctacacgatttgcaatcaaacccatggaagattaacctttttcctctacatcagtgtgttaattcatacaaactttctacctacattcttcacttcaccatcacaatcacaaacactctgtggttcaaccaatcaaacaaaacttatctgaagtcccagatcatcccaagtcattgtttatcagatctagtactcaaataagttaataaaaaatatacacatggacgtccatggggcaaatgcaaacatgtttgtttttcttgttttattgccactagtctctagtcagtgtgttaatcttacaaccagaactcaattaccccctgcatacactaattctttcacacgtggtgtttattaccctgacaaagttttcagatcctcagttttacattcaactcaggacttgttcttacctttcttttccaatgttacttggttccatgctatacatgtctctgggaccaatggtactaagaggtttgataaccctgtcctaccatttaatgatggtgtttattttgcttccactgagaagtctaacataataagaggctggatttttggtactactttagattcgaagacccagtccctacttattgttaataacgctactaatgttgttattaaagtctgtgaatttcaattttgtaatgatccatttttgggtgtttattaccacaaaaacaacaaaagttggatggaaagtgagttcagagtttattctagtgcgaataattgcacttttgaatatgtctctcagccttttcttatggaccttgaaggaaaacagggtaatttcaaaaatcttagggaatttgtgtttaagaatattgatggttattttaaaatatattctaagcacacgcctattaatttagtgcgtgatctccctcagggtttttcggctttagaaccattggtagatttgccaataggtattaacatcactaggtttcaaactttacttgctttacatagaagttatttgactcctggtgattcttcttcaggttggacagctggtgctgcagcttattatgtgggttatcttcaacctaggacttttctattaaaatataatgaaaatggaaccattacagatgctgtagactgtgcacttgaccctctctcagaaacaaagtgtacgttgaaatccttcactgtagaaaaaggaatctatcaaacttctaactttagagtccaaccaacagaatctattgttagatttcctaatattacaaacttgtgcccttttggtgaagtttttaacgccaccagatttgcatctgtttatgcttggaacaggaagagaatcagcaactgtgttgctgattattctgtcctatataattccgcatcattttccacttttaagtgttatggagtgtctcctactaaattaaatgatctctgctttactaatgtctatgcagattcatttgtaattagaggtgatgaagtcagacaaatcgctccagggcaaactggaaagattgctgattataattataaattaccagatgattttacaggctgcgttatagcttggaattctaacaatcttgattctaaggttggtggtaattataattacctgtatagattgtttaggaagtctaatctcaaaccttttgagagagatatttcaactgaaatctatcaggccggtagcacaccttgtaatggtgttgaaggttttaattgttactttcctttacaatcatatggtttccaacccactaatggtgttggttaccaaccatacagagtagtagtactttcttttgaacttctacatgcaccagcaactgtttgtggacctaaaaagtctactaatttggttaaaaacaaatgtgtcaatttcaacttcaatggtttaacaggcacaggtgttcttactgagtctaacaaaaagtttctgcctttccaacaatttggcagagacattgctgacactactgatgctgtccgtgatccacagacacttgagattcttgacattacaccatgttcttttggtggtgtcagtgttataacaccaggaacaaatacttctaaccaggttgctgttctttatcaggatgttaactgcacagaagtccctgttgctattcatgcagatcaacttactcctacttggcgtgtttattctacaggttctaatgtttttcaaacacgtgcaggctgtttaataggggctgaacatgtcaacaactcatatgagtgtgacatacccattggtgcaggtatatgcgctagttatcagactcagactaattctcctcggcgggcacgtagtgtagctagtcaatccatcattgcctacactatgtcacttggtgcagaaaattcagttgcttactctaataactctattgccatacccacaaattttactattagtgttaccacagaaattctaccagtgtctatgaccaagacatcagtagattgtacaatgtacatttgtggtgattcaactgaatgcagcaatcttttgttgcaatatggcagtttttgtacacaattaaaccgtgctttaactggaatagctgttgaacaagacaaaaacacccaagaagtttttgcacaagtcaaacaaatttacaaaacaccaccaattaaagattttggtggttttaatttttcacaaatattaccagatccatcaaaaccaagcaagaggtcatttattgaagatctacttttcaacaaagtgacacttgcagatgctggcttcatcaaacaatatggtgattgccttggtgatattgctgctagagacctcatttgtgcacaaaagtttaacggccttactgttttgccacctttgctcacagatgaaatgattgctcaatacacttctgcactgttagcgggtacaatcacttctggttggacctttggtgcaggtgctgcattacaaataccatttgctatgcaaatggcttataggtttaatggtattggagttacacagaatgttctctatgagaaccaaaaattgattgccaaccaatttaatagtgctattggcaaaattcaagactcactttcttccacagcaagtgcacttggaaaacttcaagatgtggtcaaccaaaatgcacaagctttaaacacgcttgttaaacaacttagctccaattttggtgcaatttcaagtgttttaaatgatatcctttcacgtcttgacaaagttgaggctgaagtgcaaattgataggttgatcacaggcagacttcaaagtttgcagacatatgtgactcaacaattaattagagctgcagaaatcagagcttctgctaatcttgctgctactaaaatgtcagagtgtgtacttggacaatcaaaaagagttgatttttgtggaaagggctatcatcttatgtccttccctcagtcagcacctcatggtgtagtcttcttgcatgtgacttatgtccctgcacaagaaaagaacttcacaactgctcctgccatttgtcatgatggaaaagcacactttcctcgtgaaggtgtctttgtttcaaatggcacacactggtttgtaacacaaaggaatttttatgaaccacaaatcattactacagacaacacatttgtgtctggtaactgtgatgttgtaataggaattgtcaacaacacagtttatgatcctttgcaacctgaattagactcattcaaggaggagttagataaatattttaagaatcatacatcaccagatgttgatttaggtgacatctctggcattaatgcttcagttgtaaacattcaaaaagaaattgaccgcctcaatgaggttgccaagaatttaaatgaatctctcatcgatctccaagaacttggaaagtatgagcagtatataaaatggccatggtacatttggctaggttttatagctggcttgattgccatagtaatggtgacaattatgctttgctgtatgaccagttgctgtagttgtctcaaggccagaagcacaccaatcacactaagcaaggatcaactgagtggtataaataatattgcatttagtaactaaataaaaatagcacctaatcatgttcttacaatggtttactatctgctcatagacaacccatctatcattggattttcttaaaatctgaacttcatcgaaactcttatctataaaccatctcacttacactatttaagtagattcctagtttatagttatataaaacacaattgaatgccagtcgaccttaccatctgtaaaaatgaaaactggggcaaatatgtcacgaaggaatccttgcaaatttgaaattcgaggtcattgcttaaatggtaagaggtgtcattttagtcataattattttgaatggccaccccatgcactgcttgtaagacaaaactttatgttaaacagaatacttaagtctatggataaaagtatagataccttatcagaaataagtggagctgcagagttggacagaacagaagagtatgctcttggtgtagttggagtgctagagagttatataggatcaataaacaatataactaaacaatcagcatgtgttgccatgagcaaactcctcactgaactcaatagtgatgatatcaaaaagctgagggacaatgaagagctaaattcacccaagataagagtgtacaatactgtcatatcatatattgaaagcaacaggaaaaacaataaacaaactatccatctgttaaaaagattgccagcagacgtattgaagaaaaccatcaaaaacacattggatatccataagagcataaccatcaacaacccaaaagaatcaactgttagtgatacaaatgaccatgccaaaaataatgatactacctgacaaatatccttgtagtataacttccatactaataacaagtagatgtagagttactatgtataatcaaaagaacacactatatttcaatcaaaacaacccaaataaccatatgtactcaccgaatcaaacattcaatgaaatccattggacctctcaagaattgattgacacaattcaaaattttctacaacatctaggtattattgaggatatatatacaatatatatattagtgtcataacactcaattctaacactcaccacatcgttacattattaattcaaacaattcaagttgtgggacaaaatggatcccattattaatggaaattctgctaatgtttatctaaccgatagttatttaaaaggtgttatctctttctcagagtgtaatgctttaggaagttacatattcaatggtccttatctcaaaaatgattataccaacttaattagtagacaaaatccattaatagaacacatgaatctaaagaaactaaatataacacagtccttaatatctaagtatcataaaggtgaaataaaattagaagaacctacttattttcagtcattacttatgacatacaagagtatgacctcgtcagaacagattgctaccactaatttacttaaaaagataataagaagagctatagaaataagtgatgtcaaagtctatgctatattgaataaactagggcttaaagaaaaggacaagattaaatccaacaatggacaagatgaagacaactcagttattacgaccataatcaaagatgatatactttcagctgttaaagataatcaatctcatcttaaagcagacaaaaatcactctacaaaacaaaaagacacaatcaaaacaacactcttgaagaaattgatgtgttcaatgcaacatcctccatcatggttaatacattggtttaacttatacacaaaattaaacaacatattaacacagtatcgatcaaatgaggtaaaaaaccatgggtttacattgatagataatcaaactcttagtggatttcaatttattttgaaccaatatggttgtatagtttatcataaggaactcaaaagaattactgtgacaacctataatcaattcttgacatggaaagatattagccttagtagattaaatgtttgtttaattacatggattagtaactgcttgaacacattaaataaaagcttaggcttaagatgcggattcaataatgttatcttgacacaactattcctttatggagattgtatactaaagctatttcacaatgaggggttctacataataaaagaggtagagggatttattatgtctctaattttaaatataacagaagaagatcaattcagaaaacgattttataatagtatgctcaacaacatcacagatgctgctaataaagctcagaaaaatctgctatcaagagtatgtcatacattattagataagacagtgtccgataatataataaatggcagatggataattctattaagtaagttccttaaattaattaagcttgcaggtgacaataaccttaacaatctgagtgaactatattttttgttcagaatatttggacacccaatggtagatgaaagacaagccatggatgctgttaaaattaattgcaatgagaccaaattttacttgttaagcagtctgagtatgttaagaggtgcctttatatatagaattataaaagggtttgtaaataattacaacagatggcctactttaagaaatgctattgttttacccttaagatggttaacttactataaactaaacacttatccttctttgttggaacttacagaaagagatttgattgtgttatcaggactacgtttctatcgtgagtttcggttgcctaaaaaagtggatcttgaaatgattataaatgataaagctatatcacctcctaaaaatttgatatggactagtttccctagaaattacatgccatcacacatacaaaactatatagaacatgaaaaattaaaattttccgagagtgataaatcaagaagagtattagagtattatttaagagataacaaattcaatgaatgtgatttatacaactgtgtagttaatcaaagttatctcaacaaccctaatcatgtggtatcattgacaggcaaagaaagagaactcagtgtaggtagaatgtttgcaatgcaaccgggaatgttcagacaggttcaaatattggcagagaaaatgatagctgaaaacattttacaattctttcctgaaagtcttacaagatatggtgatctagaactacaaaaaatattagaattgaaagcaggaataagtaacaaatcaaatcgctacaatgataattacaacaattacattagtaagtgctctatcatcacagatctcagcaaattcaatcaagcatttcgatatgaaacgtcatgtatttgtagtgatgtgctggatgaactgcatggtgtacaatctctattttcctggttacatttaactattcctcatgtcacaataatatgcacatataggcatgcacccccctatataggagatcatattgtagatcttaacaatgtagatgaacaaagtggattatatagatatcacatgggtggcatcgaagggtggtgtcaaaaactgtggaccatagaagctatatcactattggatctaatatctctcaaagggaaattctcaattactgctttaattaatggtgacaatcaatcaatagatataagcaaaccaatcagactcatggaaggtcaaactcatgctcaagcagattatttgctagcattaaatagccttaaattactgtataaagagtatgcaggcataggccacaaattaaaaggaactgagacttatatatcacgagatatgcaatttatgagtaaaacaattcaacataacggtgtatattacccagctagtataaagaaagtcctaagagtgggaccgtggataaacactatacttgatgatttcaaagtgagtctagaatctataggtagtttgacacaagaattagaatatagaggtgaaagtctattatgcagtttaatatttagaaatgtatggttatataatcagattgctctacaattaaaaaatcatgcattatgtaacaataaactatatttggacatattaaaggttctgaaacacttaaaaaccttttttaatcttgataatattgatacagcattaacattgtatatgaatttacccatgttatttggtggtggtgatcccaacttgttatatcgaagtttctatagaagaactcctgacttcctcacagaggctatagttcactctgtgttcatacttagttattatacaaaccatgacttaaaagataaacttcaagatctgtcagatgatagattgaataagttcttaacatgcataatcacgtttgacaaaaaccctaatgctgaattcgtaacattgatgagagatcctcaagctttagggtctgagagacaagctaaaattactagcgaaatcaatagactggcagttacagaggttttgagtacagctccaaacaaaatattctccaaaagtgcacaacattatactactacagagatagatctaaatgatattatgcaaaatatagaacctacatatcctcatgggctaagagttgtttatgaaagtttacccttttataaagcagagaaaatagtaaatcttatatcaggtacaaaatctataactaacatactggaaaaaacttctgccatagacttaacagatattgatagagccactgagatgatgaggaaaaacataactttgcttataaggatacttccattggattgtaacagagataaaagagagatattgagtatggaaaacctaagtattactgaattaagcaaatatgttagggaaagatcttggtctttatccaatatagttggtgttacatcacccagtatcatgtatacaatggacatcaaatatactacaagcactatatctagtggcataattatagagaaatataatgttaacagtttaacacgtggtgagagaggacccactaaaccatgggttggttcatctacacaagagaaaaaaacaatgccagtttataatagacaagtcttaaccaaaaaacagagagatcaaatagatctattagcaaaattggattgggtgtatgcatctatagataacaaggatgaattcatggaagaactcagcataggaacccttgggttaacatatgaaaaggccaagaaattatttccacaatatttaagtgtcaattatttgcatcgccttacagtcagtagtagaccatgtgaattccctgcatcaataccagcttatagaacaacaaattatcactttgacactagccctattaatcgcatattaacagaaaagtatggtgatgaagatattgacatagtattccaaaactgtataagctttggccttagtttaatgtcagtagtagaacaatttactaatgtatgtcctaacagaattattctcatacctaagcttaatgagatacatttgatgaaacctcccatattcacaggtgatgttgatattcacaagttaaaacaagtgatacaaaaacagcatatgtttttaccagacaaaataagtttgactcaatatgtggaattattcttaagtaataaaacactcaaatctggatctcatgttaattctaatttaatattggcacataaaatatctgactattttcataatacttacattttaagtactaatttagctggacattggattctgattatacaacttatgaaagattctaaaggtatttttgaaaaagattggggagagggatatataactgatcatatgtttattaatttgaaagttttcttcaatgcttataagacctatctcttgtgttttcataaaggttatggcaaagcaaagctggagtgtgatatgaacacttcagatcttctatgtgtattggaattaatagacagtagttattggaagtctatgtctaaggtatttttagaacaaaaagttatcaaatacattcttagccaagatgcaagtttacatagagtaaaaggatgtcatagcttcaaattatggtttcttaaacgtcttaatgtagcagaattcacagtttgcccttgggttgttaacatagattatcatccaacacatatgaaagcaatattaacttatatagatcttgttagaatgggattgataaatatagatagaatacacattaaaaataaacacaaattcaatgatgaattttatacttctaatctcttctacattaattataacttctcagataatactcatctattaactaaacatataaggattgctaattctgaattagaaaataattacaacaaattatatcatcctacaccagaaaccctagagaatatactagccaatccgattaaaagtaatgacaaaaagacactgaatgactattgtataggtaaaaatgttgactcaataatgttaccattgttatctaataagaagcttattaaatcgtctgcaatgattagaaccaattacagcaaacaagatttgtataatttattccctatggttgtgattgatagaattatagatcattcaggcaatacagccaaatccaaccaactttacactactacttcccaccaaatatctttagtgcacaatagcacatcactttactgcatgcttccttggcatcatattaatagattcaattttgtatttagttctacaggttgtaaaattagtatagagtatattttaaaagatcttaaaattaaagatcccaattgtatagcattcataggtgaaggagcagggaatttattattgcgtacagtagtggaacttcatcctgacataagatatatttacagaagtctgaaagattgcaatgatcatagtttacctattgagtttttaaggctgtacaatggacatatcaacattgattatggtgaaaatttgaccattcctgctacagatgcaaccaacaacattcattggtcttatttacatataaagtttgctgaacctatcagtctttttgtctgtgatgccgaattgtctgtaacagtcaactggagtaaaattataatagaatggagcaagcatgtaagaaagtgcaagtactgttcctcagttaataaatgtatgttaatagtaaaatatcatgctcaagatgatattgatttcaaattagacaatataactatattaaaaacttatgtatgcttaggcagtaagttaaagggatcggaggtttacttagtccttacaataggtcctgcgaatatattcccagtatttaatgtagtacaaaatgctaaattgatactatcaagaaccaaaaatttcatcatgcctaagaaagctgataaagagtctattgatgcaaatattaaaagtttgataccctttctttgttaccctataacaaaaaaaggaattaatactgcattgtcaaaactaaagagtgttgttagtggagatatactatcatattctatagctggacgtaatgaagttttcagcaataaacttataaatcataagcatatgaacatcttaaaatggttcaatcatgttttaaatttcagatcaacagaactaaactataaccatttatatatggtagaatctacatatccttacctaagtgaattgttaaacagcttgacaaccaatgaacttaaaaaactgattaaaatcacaggtagtctgttatacaactttcataatgaataatgaataaagatcttataataaaaattcccatagctatacactaacactgtattcaattatagttattaaaaattaaaaatcgtacgattttttaaataacttttagtgaactaatcctaaagttatcattttaatcttggaggaataaatttaaaccctaatctaattggtttatatgtgtattaactaaattacgagatattagtttttgacactttttttctcgtgggtcggcatggcatctccacctcctcgcggtccgacctgggcatccgaaggaggacgcacgtccactcggatggctaagggagctgctaacaaagcccgaaaggaagctgagttggctgctgccaccgctgagcaataactagcataaccccttggggcctctaaacgggtcttgaggggttttttgctgaaaggaggaactatatacgcgtaagcttctcgacccattctcatgtttgacagcttatcatcgaatttctgccattcatccgcttattatcacttattcaggcgtagcaaccaggcgtttaagggcaccaataactgccttaaaaaaattacgccccgccctgccactcatcgcagtactgttgtaattcattaagcattctgccgacatggaagccatcacagacggcatgatgaacctgaatcgccagcggcatcagcaccttgtcgccttgcgtataatatttgcccatggtgaaaacgggggcgaagaagttgtccatattggccacgtttaaatcaaaactggtgaaactcacccagggattggctgagacgaaaaacatattctcaataaaccctttagggaaataggccaggttttcaccgtaacacgccacatcttgcgaatatatgtgtagaaactgccggaaatcgtcgtggtattcactccagagcgatgaaaacgtttcagtttgctcatggaaaacggtgtaacaagggtgaacactatcccatatcaccagctcaccgtctttcattgccatacggaattccggatgagcattcatcaggcgggcaagaatgtgaataaaggccggataaaacttgtgcttatttttctttacggtctttaaaaaggccgtaatatccagctgaacggtctggttataggtacattgagcaactgactgaaatgcctcaaaatgttctttacgatgccattgggatatatcaacggtggtatatccagtgatttttttctccattttagcttccttagctcctgaaaatctcgataactcaaaaaatacgcccggtagtgatcttatttcattatggtgaaagttggaacctcttacgtgccgatcaacgtctcattttcgccaaaagttggcccagggcttcccggtatcaacagggacaccaggatttatttattctgcgaagtgatcttccgtcacaggtatttattcgcgataagctcatggagcggcgtaaccgtcgcacaggaaggacagagaaagcgcggatctgggaagtgacggacagaacggtcaggacctggattggggaggcggttgccgccgctgctgctgacggtgtgacgttctctgttccggtcacaccacatacgttccgccattcctatgcgatgcacatgctgtatgccggtataccgctgaaagttctgcaaagcctgatgggacataagtccatcagttcaacggaagtctacacgaaggtttttgcgctggatgtggctgcccggcaccgggtgcagtttgcgatgccggagtctgatgcggttgcgatgctgaaacaattatcctgagaataaatgccttggcctttatatggaaatgtggaactgagtggatatgctgtttttgtctgttaaacagagaagctggctgttatccactgagaagcgaacgaaacagtcgggaaaatctcccattatcgtagagatccgcattattaatctcaggagcctgtgtagcgtttataggaagtagtgttctgtcatgatgcctgcaagcggtaacgaaaacgatttgaatatgccttcaggaacaatagaaatcttcgtgcggtgttacgttgaagtggagcggattatgtcagcaatggacagaacaacctaatgaacacagaaccatgatgtggtctgtccttttacagccagtaggctcgccgcagtcgagcgacggcgaagccctcgagtgagcgaggaagcaccagggaacagcacttatatattctgcttacacacgatgcctgaaaaaacttcccttggggttatccacttatccacggggatatttttataattattttttttatagtttttagatcttcttttttagagcgccttgtaggcctttatccatgctggttctagagaaggtgttgtgacaaattgccctttcagtgtgacaaatcaccctcaaatgacagtcctgtctgtgacaaattgcccttaaccctgtgacaaattgccctcagaagaagctgttttttcacaaagttatccctgcttattgactcttttttatttagtgtgacaatctaaaaacttgtcacacttcacatggatctgtcatggcggaaacagcggttatcaatcacaagaaacgtaaaaatagcccgcgaatcgtccagtcaaacgacctcactgaggcggcatatagtctctcccgggatcaaaaacgtatgctgtatctgttcgttgaccagatcagaaaatctgatggcaccctacaggaacatgacggtatctgcgagatccatgttgctaaatatgctgaaatattcggattgacctctgcggaagccagtaaggatatacggcaggcattgaagagtttcgcggggaaggaagtggttttttatcgccctgaagaggatgccggcgatgaaaaaggctatgaatcttttccttggtttatcaaacgtgcgcacagtccatccagagggctttacagtgtacatatcaacccatatctcattcccttctttatcgggttacagaaccggtttacgcagtttcggcttagtgaaacaaaagaaatcaccaatccgtatgccatgcgtttatacgaatccctgtgtcagtatcgtaagccggatggctcaggcatcgtctctctgaaaatcgactggatcatagagcgttaccagctgcctcaaagttaccagcgtatgcctgacttccgccgccgcttcctgcaggtctgtgttaatgagatcaacagcagaactccaatgcgcctctcatacattgagaaaaagaaaggccgccagacgactcatatcgtattttccttccgcgatatcacttccatgacgacaggatagtctgagggttatctgtcacagatttgagggtggttcgtcacatttgttctgacctactgagggtaatttgtcacagttttgctgtttccttcagcctgcatggattttctcatactttttgaactgtaatttttaaggaagccaaatttgagggcagtttgtcacagttgatttccttctctttcccttcgtcatgtgacctgatatcgggggttagttcgtcatcattgatgagggttgattatcacagtttattactctgaattggctatccgcgtgtgtacctctacctggagtttttcccacggtggatatttcttcttgcgctgagcgtaagagctatctgacagaacagttcttctttgcttcctcgccagttcgctcgctatgctcggttacacggctgcggcgagcgctagtgataataagtgactgaggtatgtgctcttcttatctccttttgtagtgttgctcttattttaaacaactttgcggttttttgatgactttgcgattttgttgttgctttgcagtaaattgcaagatttaataaaaaaacgcaaagcaatgattaaaggatgttcagaatgaaactcatggaaacacttaaccagtgcataaacgctggtcatgaaatgacgaaggctatcgccattgcacagtttaatgatgacagcccggaagcgaggaaaataacccggcgctggagaataggtgaagcagcggatttagttggggtttcttctcaggctatcagagatgccgagaaagcagggcgactaccgcacccggatatggaaattcgaggacgggttgagcaacgtgttggttatacaattgaacaaattaatcatatgcgtgatgtgtttggtacgcgattgcgacgtgctgaagacgtatttccaccggtgatcggggttgctgcccataaaggtggcgtttacaaaacctcagtttctgttcatcttgctcaggatctggctctgaaggggctacgtgttttgctcgtggaaggtaacgacccccagggaacagcctcaatgtatcacggatgggtaccagatcttcatattcatgcagaagacactctcctgcctttctatcttggggaaaaggacgatgtcacttatgcaataaagcccacttgctggccggggcttgacattattccttcctgtctggctctgcaccgtattgaaactgagttaatgggcaaatttgatgaaggtaaactgcccaccgatccacacctgatgctccgactggccattgaaactgttgctcatgactatgatgtcatagttattgacagcgcgcctaacctgggtatcggcacgattaatgtcgtatgtgctgctgatgtgctgattgttcccacgcctgctgagttgtttgactacacctccgcactgcagtttttcgatatgcttcgtgatctgctcaagaacgttgatcttaaagggttcgagcctgatgtacgtattttgcttaccaaatacagcaatagtaatggctctcagtccccgtggatggaggagcaaattcgggatgcctggggaagcatggttctaaaaaatgttgtacgtgaaacggatgaagttggtaaaggtcagatccggatgagaactgtttttgaacaggccattgatcaacgctcttcaactggtgcctggagaaatgctctttctatttgggaacctgtctgcaatgaaattttcgatcgtctgattaaaccacgctgggagattagataatgaagcgtgcgcctgttattccaaaacatacgctcaatactcaaccggttgaagatacttcgttatcgacaccagctgccccgatggtggattcgttaattgcgcgcgtaggagtaatggctcgcggtaatgccattactttgcctgtatgtggtcgggatgtgaagtttactcttgaagtgctccggggtgatagtgttgagaagacctctcgggtatggtcaggtaatgaacgtgaccaggagctgcttactgaggacgcactggatgatctcatcccttcttttctactgactggtcaacagacaccggcgttcggtcgaagagtatctggtgtcatagaaattgccgatgggagtcgccgtcgtaaagctgctgcacttaccgaaagtgattatcgtgttctggttggcgagctggatgatgagcagatggctgcattatccagattgggtaacgattatcgcccaacaagtgcttatgaacgtggtcagcgttatgcaagccgattgcagaatgaatttgctggaaatatttctgcgctggctgatgcggaaaatatttcacgtaagattattacccgctgtatcaacaccgccaaattgcctaaatcagttgttgctcttttttctcaccccggtgaactatctgcccggtcaggtgatgcacttcaaaaagcctttacagataaagaggaattacttaagcagcaggcatctaaccttcatgagcagaaaaaagctggggtgatatttgaagctgaagaagttatcactcttttaacttctgtgcttaaaacgtcatctgcatcaagaactagtttaagctcacgacatcagtttgctcctggagcgacagtattgtataagggcgataaaatggtgcttaacctggacaggtctcgtgttccaactgagtgtatagagaaaattgaggccattcttaaggaacttgaaaagccagcaccctgatgcgaccacgttttagtctacgtttatctgtctttacttaatgtcctttgttacaggccagaaagcataactggcctgaatattctctctgggcccactgttccacttgtatcgtcggtctgataatcagactgggaccacggtcccactcgtatcgtcggtctgattattagtctgggaccacggtcccactcgtatcgtcggtctgattattagtctgggaccacggtcccactcgtatcgtcggtctgataatcagactgggaccacggtcccactcgtatcgtcggtctgattattagtctgggaccatggtcccactcgtatcgtcggtctgattattagtctgggaccacggtcccactcgtatcgtcggtctgattattagtctggaaccacggtcccactcgtatcgtcggtctgattattagtctgggaccacggtcccactcgtatcgtcggtctgattattagtctgggaccacgatcccactcgtgttgtcggtctgattatcggtctgggaccacggtcccacttgtattgtcgatcagactatcagcgtgagactacgattccatcaatgcctgtcaagggcaagtattgacatgtcgtcgtaacctgtagaacggagtaacctcggtgtgcggttgtatgcctgctgtggattgctgctgtgtcctgcttatccacaacattttgcgcacggttatgtggacaaaatacctggttacccaggccgtgccggcacgttaaccgggctgcatccgatgcaagtgtgtcgctgtcgagttt

SEQ ID NO: 136 - DNA, 22599 bp, Artificial Sequence
  Description of Artificial Sequence: Synthetic polynucleotide
aaacggatccttcgaaacgaaattaatacgactcactatagggaagtttttcgcgtctgatgaggccgttaggccgaaactcctctccggagtcacgcgaaaaaatgcgtacaacaaacttgcataaaccaaaaaaatggggcaaataagaatttgataagtaccacttaaatttaactcccttgcttagcgatgggttcgaattcgctatcgatgataaaagtacgtctacaaaatctatttgataatgatgaagtagcgctactaaaaataacgtgttatacggataaactaatacatctaacgaatgcgctagcgaaagcggtaatacatacgataaaactaaatggtatagtatttgtacatgtaataacgtcgtcggatatatgtccgaataataatatagtagtaaaatcgaattttacgacgatgccggtactacaaaatggtggttatatatgggaaatgatggaactaacgcattgttcgcaaccgaatggtctactagatgataattgtgaaataaaattttcgaaaaaactatcggattcgacgatgacgaattatatgaatcaactatcggaactactaggttttgatctaaatccgtaaattataattaatatcaactagcaaatcaatgtcactaacaccattagttaatataaaacttaacagaagacaaaaatggggcaaataaatcaattcagccaacccaaccatggatacgacgcataatgataatacgccgcaacgtctaatgataacggatatgcgtccgctatcgctagaaacgataataacgtcgctaacgcgtgatataataacgcataaatttatatatctaataaatcatgaatgtatagtacgtaaactagatgaacgtcaagcgacgtttacgtttctagtaaattatgaaatgaaactactacataaagtaggttcgacgaaatataaaaaatatacggaatataatacgaaatatggtacgtttccgatgccgatatttataaatcatgatggttttctagaatgtataggtataaaaccgacgaaacatacgccgataatatataaatatgatctaaatccgtaaatttcaacacaatattcacacaatctaaaacaacaactctatgcataactatactccatagtccagatggagcctgaaaattatagtaatttaaaattaaggagagatataagatagaagatggggcaaatacaaagatggctcttagcaaagtcaagttgaatgatacactcaacaaagatcaacttctgtcatccagcaaatacaccatccaacggagcacaggagatagtattgatactcctaattatgatgtgcagaaacacatcaataagttatgtggcatgttattaatcacagaagatgctaatcataaattcactgggttaataggtatgttatatgcgatgtctaggttaggaagagaagacaccataaaaatactcagagatgcgggatatcatgtaaaagcaaatggagtagatgtaacaacacatcgtcaagacattaatggaaaagaaatgaaatttgaagtgttaacattggcaagcttaacaactgaaattcaaatcaacattgagatagaatctagaaaatcctacaaaaaaatgctaaaagaaatgggagaggtagctccagaatacaggcatgactctcctgattgtgggatgataatattatgtatagcagcattagtaataactaaattagcagcaggggacagatctggtcttacagccgtgattaggagagctaataatgtcctaaaaaatgaaatgaaacgttacaaaggcttactacccaaggacatagccaacagcttctatgaagtgtttgaaaaacatccccactttatagatgtttttgttcattttggtatagcacaatcttctaccagaggtggcagtagagttgaagggatttttgcaggattgtttatgaatgcctatggtgcagggcaagtgatgttacggtggggagtcttagcaaaatcagttaaaaatattatgttaggacatgctagtgtgcaagcagaaatggaacaagttgttgaggtttatgaatatgcccaaaaattgggtggtgaagcaggattctaccatatattgaacaacccaaaagcatcattattatctttgactcaatttcctcacttctccagtgtagtattaggcaatgctgctggcctaggcataatgggagagtacagaggtacaccgaggaatcaagatctatatgatgcagcaaaggcatatgctgaacaactcaaagaaaatggtgtgattaactacagtgtactagacttgacagcagaagaactagaggctatcaaacatcagcttaatccaaaagataatgatgtagagctttgagttaataaaaaatggggcaaataaatcatcatggaaaagtttgctcctgaattccatggagaagatgcaaacaacagggctactaaattcctagaatcaataaagggcaaattcacatcacccaaagatcccaagaaaaaagatagtatcatatctgtcaactcaatagatatagaagtaaccaaagaaagccctataacatcaaattcaactattatcaacccaacaaatgagacagatgatactgcagggaacaagcccaattatcaaagaaaacctctagtaagtttcaaagaagaccctacaccaagtgataatcccttttctaaactatacaaagaaaccatagaaacatttgataacaatgaagaagaatccagctattcatacgaagaaataaatgatcagacaaacgataatataacagcaagattagataggattgatgaaaaattaagtgaaatactaggaatgcttcacacattagtagtggcaagtgcaggacctacatctgctcgggatggtataagagatgccatgattggtttaagagaagaaatgatagaaaaaatcagaactgaagcattaatgaccaatgacagattagaagctatggcaagactcaggaatgaggaaagtgaaaagatggcaaaagacacatcagatgaagtgtctctcaatccaacatcagagaaattgaacaacctattggaagggaatgatagtgacaatgatctatcacttgaagatttctgattagttaccactcttcacatcaacacacaataccaacagaagaccaacaaactaaccaacccaatcatccaaccaaacatccatccgccaatcagccaaacagccaacaaaacaaccagccaatccaaaactaaccacccggaaaaaatctataatatagttacaaaaaaaggaaagggtggggcaaatatggaaacatacgtgaacaagcttcacgaaggctccacatacacagctgctgttcaatacaatgtcttagaaaaagacgatgaccctgcatcacttacaatatgggtgcccatgttccaatcatctatgccagcagatttacttataaaagaactagctaatgtcaacatactagtgaaacaaatatccacacccaagggaccttcactaagagtcatgataaactcaagaagtgcagtgctagcacaaatgcccagcaaatttaccatatgcgctaatgtgtccttggatgaaagaagcaaactagcatatgatgtaaccacaccctgtgaaatcaaggcatgtagtctaacatgcctaaaatcaaaaaatatgttgactacagttaaagatctcactatgaagacactcaaccctacacatgatattattgctttatgtgaatttgaaaacatagtaacatcaaaaaaagtcataataccaacatacctaagatccatcagtgtcagaaataaagatctgaacacacttgaaaatataacaaccactgaattcaaaaatgctatcacaaatgcaaaaatcatcccttactcaggattactattagtcatcacagtgactgacaacaaaggagcattcaaatacataaagccacaaagtcaattcatagtagatcttggagcttacctagaaaaagaaagtatatattatgttaccacaaattggaagcacacagctacacgatttgcaatcaaacccatggaagattaacctttttcctctacatcagtgtgttaattcatacaaactttctacctacattcttcacttcaccatcacaatcacaaacactctgtggttcaaccaatcaaacaaaacttatctgaagtcccagatcatcccaagtcattgtttatcagatctagtactcaaataagttaataaaaaatatacacatggacgtccatggggcaaatgcaaacatgtttgtttttcttgttttattgccactagtctctagtcagtgtgttaatcttacaaccagaactcaattaccccctgcatacactaattctttcacacgtggtgtttattaccctgacaaagttttcagatcctcagttttacattcaactcaggacttgttcttacctttcttttccaatgttacttggttccatgctatacatgtctctgggaccaatggtactaagaggtttgataaccctgtcctaccatttaatgatggtgtttattttgcttccactgagaagtctaacataataagaggctggatttttggtactactttagattcgaagacccagtccctacttattgttaataacgctactaatgttgttattaaagtctgtgaatttcaattttgtaatgatccatttttgggtgtttattaccacaaaaacaacaaaagttggatggaaagtgagttcagagtttattctagtgcgaataattgcacttttgaatatgtctctcagccttttcttatggaccttgaaggaaaacagggtaatttcaaaaatcttagggaatttgtgtttaagaatattgatggttattttaaaatatattctaagcacacgcctattaatttagtgcgtgatctccctcagggtttttcggctttagaaccattggtagatttgccaataggtattaacatcactaggtttcaaactttacttgctttacatagaagttatttgactcctggtgattcttcttcaggttggacagctggtgctgcagcttattatgtgggttatcttcaacctaggacttttctattaaaatataatgaaaatggaaccattacagatgctgtagactgtgcacttgaccctctctcagaaacaaagtgtacgttgaaatccttcactgtagaaaaaggaatctatcaaacttctaactttagagtccaaccaacagaatctattgttagatttcctaatattacaaacttgtgcccttttggtgaagtttttaacgccaccagatttgcatctgtttatgcttggaacaggaagagaatcagcaactgtgttgctgattattctgtcctatataattccgcatcattttccacttttaagtgttatggagtgtctcctactaaattaaatgatctctgctttactaatgtctatgcagattcatttgtaattagaggtgatgaagtcagacaaatcgctccagggcaaactggaaagattgctgattataattataaattaccagatgattttacaggctgcgttatagcttggaattctaacaatcttgattctaaggttggtggtaattataattacctgtatagattgtttaggaagtctaatctcaaaccttttgagagagatatttcaactgaaatctatcaggccggtagcacaccttgtaatggtgttgaaggttttaattgttactttcctttacaatcatatggtttccaacccactaatggtgttggttaccaaccatacagagtagtagtactttcttttgaacttctacatgcaccagcaactgtttgtggacctaaaaagtctactaatttggttaaaaacaaatgtgtcaatttcaacttcaatggtttaacaggcacaggtgttcttactgagtctaacaaaaagtttctgcctttccaacaatttggcagagacattgctgacactactgatgctgtccgtgatccacagacacttgagattcttgacattacaccatgttcttttggtggtgtcagtgttataacaccaggaacaaatacttctaaccaggttgctgttctttatcaggatgttaactgcacagaagtccctgttgctattcatgcagatcaacttactcctacttggcgtgtttattctacaggttctaatgtttttcaaacacgtgcaggctgtttaataggggctgaacatgtcaacaactcatatgagtgtgacatacccattggtgcaggtatatgcgctagttatcagactcagactaattctcctcggcgggcacgtagtgtagctagtcaatccatcattgcctacactatgtcacttggtgcagaaaattcagttgcttactctaataactctattgccatacccacaaattttactattagtgttaccacagaaattctaccagtgtctatgaccaagacatcagtagattgtacaatgtacatttgtggtgattcaactgaatgcagcaatcttttgttgcaatatggcagtttttgtacacaattaaaccgtgctttaactggaatagctgttgaacaagacaaaaacacccaagaagtttttgcacaagtcaaacaaatttacaaaacaccaccaattaaagattttggtggttttaatttttcacaaatattaccagatccatcaaaaccaagcaagaggtcatttattgaagatctacttttcaacaaagtgacacttgcagatgctggcttcatcaaacaatatggtgattgccttggtgatattgctgctagagacctcatttgtgcacaaaagtttaacggccttactgttttgccacctttgctcacagatgaaatgattgctcaatacacttctgcactgttagcgggtacaatcacttctggttggacctttggtgcaggtgctgcattacaaataccatttgctatgcaaatggcttataggtttaatggtattggagttacacagaatgttctctatgagaaccaaaaattgattgccaaccaatttaatagtgctattggcaaaattcaagactcactttcttccacagcaagtgcacttggaaaacttcaagatgtggtcaaccaaaatgcacaagctttaaacacgcttgttaaacaacttagctccaattttggtgcaatttcaagtgttttaaatgatatcctttcacgtcttgacaaagttgaggctgaagtgcaaattgataggttgatcacaggcagacttcaaagtttgcagacatatgtgactcaacaattaattagagctgcagaaatcagagcttctgctaatcttgctgctactaaaatgtcagagtgtgtacttggacaatcaaaaagagttgatttttgtggaaagggctatcatcttatgtccttccctcagtcagcacctcatggtgtagtcttcttgcatgtgacttatgtccctgcacaagaaaagaacttcacaactgctcctgccatttgtcatgatggaaaagcacactttcctcgtgaaggtgtctttgtttcaaatggcacacactggtttgtaacacaaaggaatttttatgaaccacaaatcattactacagacaacacatttgtgtctggtaactgtgatgttgtaataggaattgtcaacaacacagtttatgatcctttgcaacctgaattagactcattcaaggaggagttagataaatattttaagaatcatacatcaccagatgttgatttaggtgacatctctggcattaatgcttcagttgtaaacattcaaaaagaaattgaccgcctcaatgaggttgccaagaatttaaatgaatctctcatcgatctccaagaacttggaaagtatgagcagtatataaaatggccatggtacatttggctaggttttatagctggcttgattgccatagtaatggtgacaattatgctttgctgtatgaccagttgctgtagttgtctcaagtactgtaaggccagaagcacaccaatcacactaagcaaggatcaactgagtggtataaataatattgcatttagtaactaaataaaaatagcacctaatcatgttcttacaatggtttactatctgctcatagacaacccatctatcattggattttcttaaaatctgaacttcatcgaaactcttatctataaaccatctcacttacactatttaagtagattcctagtttatagttatataaaacacaattgaatgccagtcgaccttaccatctgtaaaaatgaaaactggggcaaatatgtcacgaaggaatccttgcaaatttgaaattcgaggtcattgcttaaatggtaagaggtgtcattttagtcataattattttgaatggccaccccatgcactgcttgtaagacaaaactttatgttaaacagaatacttaagtctatggataaaagtatagataccttatcagaaataagtggagctgcagagttggacagaacagaagagtatgctcttggtgtagttggagtgctagagagttatataggatcaataaacaatataactaaacaatcagcatgtgttgccatgagcaaactcctcactgaactcaatagtgatgatatcaaaaagctgagggacaatgaagagctaaattcacccaagataagagtgtacaatactgtcatatcatatattgaaagcaacaggaaaaacaataaacaaactatccatctgttaaaaagattgccagcagacgtattgaagaaaaccatcaaaaacacattggatatccataagagcataaccatcaacaacccaaaagaatcaactgttagtgatacaaatgaccatgccaaaaataatgatactacctgacaaatatccttgtagtataacttccatactaataacaagtagatgtagagttactatgtataatcaaaagaacacactatatttcaatcaaaacaacccaaataaccatatgtactcaccgaatcaaacattcaatgaaatccattggacctctcaagaattgattgacacaattcaaaattttctacaacatctaggtattattgaggatatatatacaatatatatattagtgtcataacactcaattctaacactcaccacatcgttacattattaattcaaacaattcaagttgtgggacaaaatggatcccattattaatggaaattctgctaatgtttatctaaccgatagttatttaaaaggtgttatctctttctcagagtgtaatgctttaggaagttacatattcaatggtccttatctcaaaaatgattataccaacttaattagtagacaaaatccattaatagaacacatgaatctaaagaaactaaatataacacagtccttaatatctaagtatcataaaggtgaaataaaattagaagaacctacttattttcagtcattacttatgacatacaagagtatgacctcgtcagaacagattgctaccactaatttacttaaaaagataataagaagagctatagaaataagtgatgtcaaagtctatgctatattgaataaactagggcttaaagaaaaggacaagattaaatccaacaatggacaagatgaagacaactcagttattacgaccataatcaaagatgatatactttcagctgttaaagataatcaatctcatcttaaagcagacaaaaatcactctacaaaacaaaaagacacaatcaaaacaacactcttgaagaaattgatgtgttcaatgcaacatcctccatcatggttaatacattggtttaacttatacacaaaattaaacaacatattaacacagtatcgatcaaatgaggtaaaaaaccatgggtttacattgatagataatcaaactcttagtggatttcaatttattttgaaccaatatggttgtatagtttatcataaggaactcaaaagaattactgtgacaacctataatcaattcttgacatggaaagatattagccttagtagattaaatgtttgtttaattacatggattagtaactgcttgaacacattaaataaaagcttaggcttaagatgcggattcaataatgttatcttgacacaactattcctttatggagattgtatactaaagctatttcacaatgaggggttctacataataaaagaggtagagggatttattatgtctctaattttaaatataacagaagaagatcaattcagaaaacgattttataatagtatgctcaacaacatcacagatgctgctaataaagctcagaaaaatctgctatcaagagtatgtcatacattattagataagacagtgtccgataatataataaatggcagatggataattctattaagtaagttccttaaattaattaagcttgcaggtgacaataaccttaacaatctgagtgaactatattttttgttcagaatatttggacacccaatggtagatgaaagacaagccatggatgctgttaaaattaattgcaatgagaccaaattttacttgttaagcagtctgagtatgttaagaggtgcctttatatatagaattataaaagggtttgtaaataattacaacagatggcctactttaagaaatgctattgttttacccttaagatggttaacttactataaactaaacacttatccttctttgttggaacttacagaaagagatttgattgtgttatcaggactacgtttctatcgtgagtttcggttgcctaaaaaagtggatcttgaaatgattataaatgataaagctatatcacctcctaaaaatttgatatggactagtttccctagaaattacatgccatcacacatacaaaactatatagaacatgaaaaattaaaattttccgagagtgataaatcaagaagagtattagagtattatttaagagataacaaattcaatgaatgtgatttatacaactgtgtagttaatcaaagttatctcaacaaccctaatcatgtggtatcattgacaggcaaagaaagagaactcagtgtaggtagaatgtttgcaatgcaaccgggaatgttcagacaggttcaaatattggcagagaaaatgatagctgaaaacattttacaattctttcctgaaagtcttacaagatatggtgatctagaactacaaaaaatattagaattgaaagcaggaataagtaacaaatcaaatcgctacaatgataattacaacaattacattagtaagtgctctatcatcacagatctcagcaaattcaatcaagcatttcgatatgaaacgtcatgtatttgtagtgatgtgctggatgaactgcatggtgtacaatctctattttcctggttacatttaactattcctcatgtcacaataatatgcacatataggcatgcacccccctatataggagatcatattgtagatcttaacaatgtagatgaacaaagtggattatatagatatcacatgggtggcatcgaagggtggtgtcaaaaactgtggaccatagaagctatatcactattggatctaatatctctcaaagggaaattctcaattactgctttaattaatggtgacaatcaatcaatagatataagcaaaccaatcagactcatggaaggtcaaactcatgctcaagcagattatttgctagcattaaatagccttaaattactgtataaagagtatgcaggcataggccacaaattaaaaggaactgagacttatatatcacgagatatgcaatttatgagtaaaacaattcaacataacggtgtatattacccagctagtataaagaaagtcctaagagtgggaccgtggataaacactatacttgatgatttcaaagtgagtctagaatctataggtagtttgacacaagaattagaatatagaggtgaaagtctattatgcagtttaatatttagaaatgtatggttatataatcagattgctctacaattaaaaaatcatgcattatgtaacaataaactatatttggacatattaaaggttctgaaacacttaaaaaccttttttaatcttgataatattgatacagcattaacattgtatatgaatttacccatgttatttggtggtggtgatcccaacttgttatatcgaagtttctatagaagaactcctgacttcctcacagaggctatagttcactctgtgttcatacttagttattatacaaaccatgacttaaaagataaacttcaagatctgtcagatgatagattgaataagttcttaacatgcataatcacgtttgacaaaaaccctaatgctgaattcgtaacattgatgagagatcctcaagctttagggtctgagagacaagctaaaattactagcgaaatcaatagactggcagttacagaggttttgagtacagctccaaacaaaatattctccaaaagtgcacaacattatactactacagagatagatctaaatgatattatgcaaaatatagaacctacatatcctcatgggctaagagttgtttatgaaagtttacccttttataaagcagagaaaatagtaaatcttatatcaggtacaaaatctataactaacatactggaaaaaacttctgccatagacttaacagatattgatagagccactgagatgatgaggaaaaacataactttgcttataaggatacttccattggattgtaacagagataaaagagagatattgagtatggaaaacctaagtattactgaattaagcaaatatgttagggaaagatcttggtctttatccaatatagttggtgttacatcacccagtatcatgtatacaatggacatcaaatatactacaagcactatatctagtggcataattatagagaaatataatgttaacagtttaacacgtggtgagagaggacccactaaaccatgggttggttcatctacacaagagaaaaaaacaatgccagtttataatagacaagtcttaaccaaaaaacagagagatcaaatagatctattagcaaaattggattgggtgtatgcatctatagataacaaggatgaattcatggaagaactcagcataggaacccttgggttaacatatgaaaaggccaagaaattatttccacaatatttaagtgtcaattatttgcatcgccttacagtcagtagtagaccatgtgaattccctgcatcaataccagcttatagaacaacaaattatcactttgacactagccctattaatcgcatattaacagaaaagtatggtgatgaagatattgacatagtattccaaaactgtataagctttggccttagtttaatgtcagtagtagaacaatttactaatgtatgtcctaacagaattattctcatacctaagcttaatgagatacatttgatgaaacctcccatattcacaggtgatgttgatattcacaagttaaaacaagtgatacaaaaacagcatatgtttttaccagacaaaataagtttgactcaatatgtggaattattcttaagtaataaaacactcaaatctggatctcatgttaattctaatttaatattggcacataaaatatctgactattttcataatacttacattttaagtactaatttagctggacattggattctgattatacaacttatgaaagattctaaaggtatttttgaaaaagattggggagagggatatataactgatcatatgtttattaatttgaaagttttcttcaatgcttataagacctatctcttgtgttttcataaaggttatggcaaagcaaagctggagtgtgatatgaacacttcagatcttctatgtgtattggaattaatagacagtagttattggaagtctatgtctaaggtatttttagaacaaaaagttatcaaatacattcttagccaagatgcaagtttacatagagtaaaaggatgtcatagcttcaaattatggtttcttaaacgtcttaatgtagcagaattcacagtttgcccttgggttgttaacatagattatcatccaacacatatgaaagcaatattaacttatatagatcttgttagaatgggattgataaatatagatagaatacacattaaaaataaacacaaattcaatgatgaattttatacttctaatctcttctacattaattataacttctcagataatactcatctattaactaaacatataaggattgctaattctgaattagaaaataattacaacaaattatatcatcctacaccagaaaccctagagaatatactagccaatccgattaaaagtaatgacaaaaagacactgaatgactattgtataggtaaaaatgttgactcaataatgttaccattgttatctaataagaagcttattaaatcgtctgcaatgattagaaccaattacagcaaacaagatttgtataatttattccctatggttgtgattgatagaattatagatcattcaggcaatacagccaaatccaaccaactttacactactacttcccaccaaatatctttagtgcacaatagcacatcactttactgcatgcttccttggcatcatattaatagattcaattttgtatttagttctacaggttgtaaaattagtatagagtatattttaaaagatcttaaaattaaagatcccaattgtatagcattcataggtgaaggagcagggaatttattattgcgtacagtagtggaacttcatcctgacataagatatatttacagaagtctgaaagattgcaatgatcatagtttacctattgagtttttaaggctgtacaatggacatatcaacattgattatggtgaaaatttgaccattcctgctacagatgcaaccaacaacattcattggtcttatttacatataaagtttgctgaacctatcagtctttttgtctgtgatgccgaattgtctgtaacagtcaactggagtaaaattataatagaatggagcaagcatgtaagaaagtgcaagtactgttcctcagttaataaatgtatgttaatagtaaaatatcatgctcaagatgatattgatttcaaattagacaatataactatattaaaaacttatgtatgcttaggcagtaagttaaagggatcggaggtttacttagtccttacaataggtcctgcgaatatattcccagtatttaatgtagtacaaaatgctaaattgatactatcaagaaccaaaaatttcatcatgcctaagaaagctgataaagagtctattgatgcaaatattaaaagtttgataccctttctttgttaccctataacaaaaaaaggaattaatactgcattgtcaaaactaaagagtgttgttagtggagatatactatcatattctatagctggacgtaatgaagttttcagcaataaacttataaatcataagcatatgaacatcttaaaatggttcaatcatgttttaaatttcagatcaacagaactaaactataaccatttatatatggtagaatctacatatccttacctaagtgaattgttaaacagcttgacaaccaatgaacttaaaaaactgattaaaatcacaggtagtctgttatacaactttcataatgaataatgaataaagatcttataataaaaattcccatagctatacactaacactgtattcaattatagttattaaaaattaaaaatcgtacgattttttaaataacttttagtgaactaatcctaaagttatcattttaatcttggaggaataaatttaaaccctaatctaattggtttatatgtgtattaactaaattacgagatattagtttttgacactttttttctcgtgggtcggcatggcatctccacctcctcgcggtccgacctgggcatccgaaggaggacgcacgtccactcggatggctaagggagctgctaacaaagcccgaaaggaagctgagttggctgctgccaccgctgagcaataactagcataaccccttggggcctctaaacgggtcttgaggggttttttgctgaaaggaggaactatatacgcgtaagcttctcgacccattctcatgtttgacagcttatcatcgaatttctgccattcatccgcttattatcacttattcaggcgtagcaaccaggcgtttaagggcaccaataactgccttaaaaaaattacgccccgccctgccactcatcgcagtactgttgtaattcattaagcattctgccgacatggaagccatcacagacggcatgatgaacctgaatcgccagcggcatcagcaccttgtcgccttgcgtataatatttgcccatggtgaaaacgggggcgaagaagttgtccatattggccacgtttaaatcaaaactggtgaaactcacccagggattggctgagacgaaaaacatattctcaataaaccctttagggaaataggccaggttttcaccgtaacacgccacatcttgcgaatatatgtgtagaaactgccggaaatcgtcgtggtattcactccagagcgatgaaaacgtttcagtttgctcatggaaaacggtgtaacaagggtgaacactatcccatatcaccagctcaccgtctttcattgccatacggaattccggatgagcattcatcaggcgggcaagaatgtgaataaaggccggataaaacttgtgcttatttttctttacggtctttaaaaaggccgtaatatccagctgaacggtctggttataggtacattgagcaactgactgaaatgcctcaaaatgttctttacgatgccattgggatatatcaacggtggtatatccagtgatttttttctccattttagcttccttagctcctgaaaatctcgataactcaaaaaatacgcccggtagtgatcttatttcattatggtgaaagttggaacctcttacgtgccgatcaacgtctcattttcgccaaaagttggcccagggcttcccggtatcaacagggacaccaggatttatttattctgcgaagtgatcttccgtcacaggtatttattcgcgataagctcatggagcggcgtaaccgtcgcacaggaaggacagagaaagcgcggatctgggaagtgacggacagaacggtcaggacctggattggggaggcggttgccgccgctgctgctgacggtgtgacgttctctgttccggtcacaccacatacgttccgccattcctatgcgatgcacatgctgtatgccggtataccgctgaaagttctgcaaagcctgatgggacataagtccatcagttcaacggaagtctacacgaaggtttttgcgctggatgtggctgcccggcaccgggtgcagtttgcgatgccggagtctgatgcggttgcgatgctgaaacaattatcctgagaataaatgccttggcctttatatggaaatgtggaactgagtggatatgctgtttttgtctgttaaacagagaagctggctgttatccactgagaagcgaacgaaacagtcgggaaaatctcccattatcgtagagatccgcattattaatctcaggagcctgtgtagcgtttataggaagtagtgttctgtcatgatgcctgcaagcggtaacgaaaacgatttgaatatgccttcaggaacaatagaaatcttcgtgcggtgttacgttgaagtggagcggattatgtcagcaatggacagaacaacctaatgaacacagaaccatgatgtggtctgtccttttacagccagtaggctcgccgcagtcgagcgacggcgaagccctcgagtgagcgaggaagcaccagggaacagcacttatatattctgcttacacacgatgcctgaaaaaacttcccttggggttatccacttatccacggggatatttttataattattttttttatagtttttagatcttcttttttagagcgccttgtaggcctttatccatgctggttctagagaaggtgttgtgacaaattgccctttcagtgtgacaaatcaccctcaaatgacagtcctgtctgtgacaaattgcccttaaccctgtgacaaattgccctcagaagaagctgttttttcacaaagttatccctgcttattgactcttttttatttagtgtgacaatctaaaaacttgtcacacttcacatggatctgtcatggcggaaacagcggttatcaatcacaagaaacgtaaaaatagcccgcgaatcgtccagtcaaacgacctcactgaggcggcatatagtctctcccgggatcaaaaacgtatgctgtatctgttcgttgaccagatcagaaaatctgatggcaccctacaggaacatgacggtatctgcgagatccatgttgctaaatatgctgaaatattcggattgacctctgcggaagccagtaaggatatacggcaggcattgaagagtttcgcggggaaggaagtggttttttatcgccctgaagaggatgccggcgatgaaaaaggctatgaatcttttccttggtttatcaaacgtgcgcacagtccatccagagggctttacagtgtacatatcaacccatatctcattcccttctttatcgggttacagaaccggtttacgcagtttcggcttagtgaaacaaaagaaatcaccaatccgtatgccatgcgtttatacgaatccctgtgtcagtatcgtaagccggatggctcaggcatcgtctctctgaaaatcgactggatcatagagcgttaccagctgcctcaaagttaccagcgtatgcctgacttccgccgccgcttcctgcaggtctgtgttaatgagatcaacagcagaactccaatgcgcctctcatacattgagaaaaagaaaggccgccagacgactcatatcgtattttccttccgcgatatcacttccatgacgacaggatagtctgagggttatctgtcacagatttgagggtggttcgtcacatttgttctgacctactgagggtaatttgtcacagttttgctgtttccttcagcctgcatggattttctcatactttttgaactgtaatttttaaggaagccaaatttgagggcagtttgtcacagttgatttccttctctttcccttcgtcatgtgacctgatatcgggggttagttcgtcatcattgatgagggttgattatcacagtttattactctgaattggctatccgcgtgtgtacctctacctggagtttttcccacggtggatatttcttcttgcgctgagcgtaagagctatctgacagaacagttcttctttgcttcctcgccagttcgctcgctatgctcggttacacggctgcggcgagcgctagtgataataagtgactgaggtatgtgctcttcttatctccttttgtagtgttgctcttattttaaacaactttgcggttttttgatgactttgcgattttgttgttgctttgcagtaaattgcaagatttaataaaaaaacgcaaagcaatgattaaaggatgttcagaatgaaactcatggaaacacttaaccagtgcataaacgctggtcatgaaatgacgaaggctatcgccattgcacagtttaatgatgacagcccggaagcgaggaaaataacccggcgctggagaataggtgaagcagcggatttagttggggtttcttctcaggctatcagagatgccgagaaagcagggcgactaccgcacccggatatggaaattcgaggacgggttgagcaacgtgttggttatacaattgaacaaattaatcatatgcgtgatgtgtttggtacgcgattgcgacgtgctgaagacgtatttccaccggtgatcggggttgctgcccataaaggtggcgtttacaaaacctcagtttctgttcatcttgctcaggatctggctctgaaggggctacgtgttttgctcgtggaaggtaacgacccccagggaacagcctcaatgtatcacggatgggtaccagatcttcatattcatgcagaagacactctcctgcctttctatcttggggaaaaggacgatgtcacttatgcaataaagcccacttgctggccggggcttgacattattccttcctgtctggctctgcaccgtattgaaactgagttaatgggcaaatttgatgaaggtaaactgcccaccgatccacacctgatgctccgactggccattgaaactgttgctcatgactatgatgtcatagttattgacagcgcgcctaacctgggtatcggcacgattaatgtcgtatgtgctgctgatgtgctgattgttcccacgcctgctgagttgtttgactacacctccgcactgcagtttttcgatatgcttcgtgatctgctcaagaacgttgatcttaaagggttcgagcctgatgtacgtattttgcttaccaaatacagcaatagtaatggctctcagtccccgtggatggaggagcaaattcgggatgcctggggaagcatggttctaaaaaatgttgtacgtgaaacggatgaagttggtaaaggtcagatccggatgagaactgtttttgaacaggccattgatcaacgctcttcaactggtgcctggagaaatgctctttctatttgggaacctgtctgcaatgaaattttcgatcgtctgattaaaccacgctgggagattagataatgaagcgtgcgcctgttattccaaaacatacgctcaatactcaaccggttgaagatacttcgttatcgacaccagctgccccgatggtggattcgttaattgcgcgcgtaggagtaatggctcgcggtaatgccattactttgcctgtatgtggtcgggatgtgaagtttactcttgaagtgctccggggtgatagtgttgagaagacctctcgggtatggtcaggtaatgaacgtgaccaggagctgcttactgaggacgcactggatgatctcatcccttcttttctactgactggtcaacagacaccggcgttcggtcgaagagtatctggtgtcatagaaattgccgatgggagtcgccgtcgtaaagctgctgcacttaccgaaagtgattatcgtgttctggttggcgagctggatgatgagcagatggctgcattatccagattgggtaacgattatcgcccaacaagtgcttatgaacgtggtcagcgttatgcaagccgattgcagaatgaatttgctggaaatatttctgcgctggctgatgcggaaaatatttcacgtaagattattacccgctgtatcaacaccgccaaattgcctaaatcagttgttgctcttttttctcaccccggtgaactatctgcccggtcaggtgatgcacttcaaaaagcctttacagataaagaggaattacttaagcagcaggcatctaaccttcatgagcagaaaaaagctggggtgatatttgaagctgaagaagttatcactcttttaacttctgtgcttaaaacgtcatctgcatcaagaactagtttaagctcacgacatcagtttgctcctggagcgacagtattgtataagggcgataaaatggtgcttaacctggacaggtctcgtgttccaactgagtgtatagagaaaattgaggccattcttaaggaacttgaaaagccagcaccctgatgcgaccacgttttagtctacgtttatctgtctttacttaatgtcctttgttacaggccagaaagcataactggcctgaatattctctctgggcccactgttccacttgtatcgtcggtctgataatcagactgggaccacggtcccactcgtatcgtcggtctgattattagtctgggaccacggtcccactcgtatcgtcggtctgattattagtctgggaccacggtcccactcgtatcgtcggtctgataatcagactgggaccacggtcccactcgtatcgtcggtctgattattagtctgggaccatggtcccactcgtatcgtcggtctgattattagtctgggaccacggtcccactcgtatcgtcggtctgattattagtctggaaccacggtcccactcgtatcgtcggtctgattattagtctgggaccacggtcccactcgtatcgtcggtctgattattagtctgggaccacgatcccactcgtgttgtcggtctgattatcggtctgggaccacggtcccacttgtattgtcgatcagactatcagcgtgagactacgattccatcaatgcctgtcaagggcaagtattgacatgtcgtcgtaacctgtagaacggagtaacctcggtgtgcggttgtatgcctgctgtggattgctgctgtgtcctgcttatccacaacattttgcgcacggttatgtggacaaaatacctggttacccaggccgtgccggcacgttaaccgggctgcatccgatgcaagtgtgtcgctgtcgagttt

SEQ ID NO: 137 - protein, 4 aa, Severe acute respiratory syndrome coronavirus 2
PRRA

SEQ ID NO: 138 - protein, 4 aa, Artificial Sequence
  Description of Artificial Sequence: Synthetic peptide
PQRA

SEQ ID NO: 139 - protein, 80 aa, Artificial Sequence
  Description of Artificial Sequence: Synthetic polypeptide
KWPWYIWLGFIAGLIAIVMVTIMLCCMTSCCSCLKGCCSCGSCCKFDEDDGLLLYCKARSTPITLSKDQLSGINNIAFSN
